(19) United States
(12) Patent Application Publication
(10) Pub. No.: US 2025/0090686 A1
(43) Pub. Date: Mar. 20, 2025

(54) Precise Excisions of Portions of Exon 44, 50, and 53 for Treatment of Duchenne Muscular Dystrophy

(71) Applicant: Vertex Pharmaceuticals Incorporated, Boston, MA (US)

(72) Inventors: Tudor Fulga, Boston, MA (US); Yurong Xin, Boston, MA (US); Yi-Li Min, Boston, MA (US); Foram Ashar, Boston, MA (US); Su Wang, Boston, MA (US); Jianming Liu, Boston, MA (US); Yang Guo, Boston, MA (US); D'anna Nelson, Boston, MA (US)

(73) Assignee: Vertex Pharmaceuticals Incorporated, Boston, MA (US)

(21) Appl. No.: 18/826,808

(22) Filed: Sep. 6, 2024

Related U.S. Application Data
(63) Continuation of application No. PCT/US23/63885, filed on Mar. 7, 2023.
(60) Provisional application No. 63/317,818, filed on Mar. 8, 2022.
(60) Provisional application No. 63/374,887, filed on Sep. 7, 2022.

(51) Int. Cl. A61K 48/00; A61P 21/00; C12N 9/22; C12N 15/11; C12N 15/86

(52) U.S. Cl. CPC A61K 48/005; A61P 21/00; C12N 9/22; C12N 15/111; C12N 15/86; C12N 2310/20; C12N 2320/33; C12N 2750/14143

(57) ABSTRACT

Compositions and methods for treating Duchenne Muscular Dystrophy (DMD) and excising small portions of exons 44, 50, and 53 of the DMD gene are encompassed.

[0001] This application is a bypass continuation of PCT/US2023/63885, filed Mar. 7, 2023, which claims the benefit of priority to U.S. Provisional Application No. 63/317,818, filed Mar. 8, 2022, and U.S. Provisional Application No. 63/374,887, filed Sep. 7, 2022, all of which are incorporated herein by reference in their entirety.

[0002] The instant application contains a Sequence Listing which has been submitted electronically in XML format and is hereby incorporated by reference in its entirety. Said XML copy, created on Mar. 6, 2023, is named 01245-0034-00PCT_Sequence_Listing and is 2,227,275 bytes in size.

### INTRODUCTION AND SUMMARY

[0003] Muscular dystrophies (MD) are a group of more than 30 genetic diseases characterized by progressive weakness and degeneration of the skeletal muscles that control movement. Duchenne muscular dystrophy (DMD) is one of the most severe forms of MD that affects approximately 1 in 5000 boys and is characterized by progressive muscle weakness and premature death. Cardiomyopathy and heart failure are common, incurable and lethal features of DMD. The disease is caused by mutations in the gene encoding dystrophin (DMD), which result in loss of expression of dystrophin, causing muscle membrane fragility and progressive muscle wasting.

[0004] CRISPR-based genome editing can provide sequence-specific cleavage of genomic DNA using a Cas9 and a guide RNA. For example, a nucleic acid encoding the Cas9 enzyme and a nucleic acid encoding for the appropriate guide RNA can be provided on separate vectors or together on a single vector and administered in vivo or in vitro to knockout or correct a genetic mutation, for example. The approximately 20 nucleotides at the 5′ end of the guide RNA serves as the guide or spacer sequence that can be any sequence complementary to one strand of a genomic target location that has an adjacent protospacer adjacent motif (PAM). The PAM sequence is a short sequence adjacent to the Cas9 nuclease cut site that the Cas9 molecule requires for appropriate binding. The nucleotides 3′ of the guide or spacer sequence of the guide RNA serve as a scaffold sequence for interacting with Cas9. When a guide RNA and a Cas9 are expressed, the guide RNA will bind to Cas9 and direct it to the sequence complementary to the guide sequence, where it will then initiate a double-stranded break (DSB). To repair these breaks, cells typically use an error prone mechanism of non-homologous end joining (NHEJ) which can lead to disruption of function in the target gene through insertions or deletion of codons, shifts in the reading frame, or result in a premature stop codon triggering nonsense-mediated decay. See, e.g., Kumar et al. (2018) Front. Mol. Neurosci. Vol. 11, Article 413.

[0005] While gene editing strategies using systems (e.g., CRISPR) for treating DMD have been previously explored, these strategies have focused primarily on either: a) cutting at multiple different sites to excise large portions (e.g., one or more exons) of the dystrophin gene (see, e.g., Ousterout et al., 2015, Nat Commun. 6:6244); or b) cutting in a single site to introduce indels that either result in a frame-shifting mutation and/or that destroy a splice acceptor/donor site in the dystrophin gene (see, e.g., Amoassi et al., 2018, Science, 362(6410):86-91). However, there remains a need for additional alternative and effective gene editing strategies for treating diseases like DMD.

[0006] Provided herein are compositions and methods for treating DMD utilizing Cas proteins such as Staphylococcus aureus (SaCas9) and Staphylococcus lugdunensis (SluCas9). In some embodiments, pairs of guide RNAs that excise small portions of the DMD gene are provided, where the nucleic acid encoding the pairs of guide RNAs may be on a single nucleic acid molecule.

[0007] Accordingly, the following non-limiting embodiments are provided.
[0008] Embodiment 1 is a composition comprising one or more guide RNAs or a nucleic acid encoding one or more guide RNAs, wherein the one or more guide RNAs comprise i) a guide sequence of Table 6; ii) at least 16, 17, 18, 19, or 20 contiguous nucleotides of a guide sequence of Table 6; iii) a guide sequence that is at least 90% identical to a guide sequence of Table 6; or iv) any one of the guide sequence pairs shown in Tables 1B, 1D, 3B, 3D, 5B, and 5D, optionally further comprising a SaCas9 or a nucleic acid encoding a SaCas9 (for SEQ ID NOs: 1-159) or a SluCas9 or a nucleic acid encoding a SluCas9 (for SEQ ID NOs: 200-292, 924-938, or 950-955).
[0009] Embodiment 2 is a composition comprising a pair of guide RNAs or a nucleic acid encoding a pair of guide RNAs, wherein the pair of guide RNAs comprise or consist of a first and a second guide sequence, wherein the first and the second guide sequences are selected from any of the following pairs of guide sequences:
   [0010] a. For exon 44 with SaCas9, SEQ ID NOs: 1 and 3; 110 and 120; 110 and 121; 110 and 122; 110 and 123; 110 and 124; 110 and 125; 111 and 112; 111 and 113; 111 and 114; 111 and 115; 111 and 116; 111 and 117; 111 and 118; 111 and 119; 111 and 120; 111 and 121; 111 and 122; 111 and 123; 111 and 124; 111 and 125; 112 and 113; 112 and 114; 112 and 115; 112 and 116; 112 and 117; 112 and 118; 112 and 119; 112 and 120; 112 and 121; 112 and 122; 112 and 123; 112 and 124; 112 and 125; 113 and 114; 113 and 115; 113 and 116; 113 and 117; 113 and 118; 113 and 119; 113 and 120; 113 and 121; 113 and 122; 113 and 123; 113 and 124; 113 and 125; 114 and 115; 114 and 116; 114 and 117; 114 and 118; 114 and 119; 114 and 120; 114 and 121; 114 and 122; 114 and 123; 114 and 124; 114 and 125; 115 and 116; 115 and 117; 115 and 118; 115 and 119; 115 and 120; 115 and 121; 115 and 122; 115 and 123; 115 and 124; 115 and 125; 116 and 117; 116 and 118; 116 and 119; 116 and 120; 116 and 121; 116 and 122; 116 and 123; 116 and 124; 116 and 125; 117 and 118; 117 and 119; 117 and 120; 117 and 121; 117 and 122; 117 and 123; 117 and 124; 117 and 125; 118 and 119; 118 and 120; 118 and 121; 118 and 122; 118 and 123; 118 and 124; 118 and 125; 119 and 120; 119 and 121; 119 and 122; 119 and 123; 119 and 124; 119 and 125; 120 and 121; 120 and 122; 120 and 123; 120 and 124; 120 and 125; 121 and 122; 121 and 123; 121 and 124; 121 and 125; 122 and 123; 122 and 124; 122 and 125; 123 and 124; 123 and 125; or 124 and 125;
   [0011] b. For exon 44 with SluCas9, SEQ ID NOs: 200 and 201; 200 and 202; 200 and 203; 200 and 204; 200 and 205; 200 and 206; 200 and 207; 200 and 208; 201 and 202; 201 and 203; 201 and 204; 201 and 205; 201 and 206; 201 and 207; 201 and 208; 202 and 203; 202 and 204; 202 and 205; 202 and 206; 202 and 207; 202 and 208; 203 and 204; 203 and 205; 203 and 206; 203 and 207; 203 and 208; 204 and 205; 204 and 206; 204 and 207; 204 and 208; 205 and 206; 205 and 207; 205 and 208; 206 and 207; 206 and 208; 207 and 208;
   [0012] c. For exon 50 with SaCas9, SEQ ID NOs: 148 and 149; 148 and 150; 148 and 151; 148 and 152; 148 and 153; 148 and 154; 148 and 155; 148 and 156; 148 and 157; 148 and 158; 148 and 159; 149 and 150; 149 and 151; 149 and 152; 149 and 153; 149 and 154; 149 and 155; 149 and 156; 149 and 157; 149 and 158; 149 and 159; 150 and 151; 150 and 152; 150 and 153; 150 and 154; 150 and 155; 150 and 156; 150 and 157; 150 and 158; 150 and 159; 151 and 152; 151 and 153; 151 and 154; 151 and 155; 151 and 156; 151 and 157; 151 and 158; 151 and 159; 152 and 153; 152 and 154; 152 and 155; 152 and 156; 152 and 157; 152 and 158; 152 and 159; 153 and 154; 153 and 155; 153 and 156; 153 and 157; 153 and 158; 153 and 159; 154 and 155; 154 and 156; 154 and 157; 154 and 158; 154 and 159; 155 and 156; 155 and 157; 155 and 158; 155 and 159; 156 and 157; 156 and 158; 156 and 159; 157 and 158; 157 and 159; or 158 and 159;
   [0013] d. For exon 50 with SluCas9, SEQ ID NOs: 231 and 232; 231 and 233; 231 and 234; 231 and 235; 231 and 236; 231 and 237; 231 and 238; 231 and 239; 231 and 240; 231 and 241; 231 and 242; 232 and 233; 232 and 234; 232 and 235; 232 and 236; 232 and 237; 232 and 238; 232 and 239; 232 and 240; 232 and 241; 232 and 242; 233 and 234; 233 and 235; 233 and 236; 233 and 237; 233 and 238; 233 and 239; 233 and 240; 233 and 241; 233 and 242; 234 and 235; 234 and 236; 234 and 237; 234 and 238; 234 and 239; 234 and 240; 234 and 241; 234 and 242; 235 and 236; 235 and 237; 235 and 238; 235 and 239; 235 and 240; 235 and 241; 235 and 242; 236 and 237; 236 and 238; 236 and 239; 236 and 240; 236 and 241; 236 and 242; 237 and 238; 237 and 239; 237 and 240; 237 and 241; 237 and 242; 238 and 239; 238 and 240; 238 and 241; 238 and 242; 239 and 240; 239 and 241; 239 and 242; 240 and 241; 240 and 242; or 241 and 242;
   [0014] e. For exon 53 with SaCas9, SEQ ID NOs: 16 and 17; 16 and 18; 16 and 19; 16 and 20; 16 and 21; 16 and 22; 16 and 23; 16 and 24; 16 and 25; 16 and 26; 17 and 18; 17 and 19; 17 and 20; 17 and 21; 17 and 22; 17 and 23; 17 and 24; 17 and 25; 17 and 26; 18 and 19; 18 and 20; 18 and 21; 18 and 22; 18 and 23; 18 and 24; 18 and 25; 18 and 26; 19 and 20; 19 and 21; 19 and 22; 19 and 23; 19 and 24; 19 and 25; 19 and 26; 20 and 21; 20 and 22; 20 and 23; 20 and 24; 20 and 25; 20 and 26; 21 and 22; 21 and 23; 21 and 24; 21 and 25; 21 and 26; 22 and 23; 22 and 24; 22 and 25; 22 and 26; 23 and 24; 23 and 25; 23 and 26; 24 and 25; 24 and 26; 25 and 26; 71 and 72; 71 and 73; 71 and 74; 71 and 75; 71 and 76; 71 and 77; 71 and 78; 71 and 84; 71 and 85; 71 and 86; 71 and 87; 71 and 88; 71 and 89; 71 and 90; 71 and 91; 71 and 92; 71 and 93; 71 and 94; 71 and 95; 71 and 96; 71 and 97; 71 and 98; 71 and 99; 71 and 100; 71 and 101; 71 and 102; 72 and 73; 72 and 74; 72 and 75; 72 and 76; 72 and 77; 72 and 78; 72 and 84; 72 and 85; 72 and 86; 72 and 87; 72 and 88; 72 and 89; 72 and 90; 72 and 91; 72 and 92; 72 and 93; 72 and 94; 72 and 95; 72 and 96; 72 and 97; 72 and 98; 72 and 99; 72 and 100; 72 and 101; 72 and 102; 73 and 74; 73 and 75; 73 and 76; 73 and 77; 73 and 78; 73 and 84; 73 and 85; 73 and 86; 73 and 87; 73 and 88; 73 and 89; 73 and 90; 73 and 91; 73 and 92; 73 and 93; 73 and 94; 73 and 95; 73 and 96; 73 and 97; 73 and 98; 73 and 99; 73 and 100; 73 and 101; 73 and 102; 74 and 75; 74 and 76; 74 and 77; 74 and 78; 74 and 84; 74 and 85; 74 and 86; 74 and 87; 74 and 88; 74 and 89; 74 and 90; 74 and 91; 74 and 92; 74 and 93; 74 and 94; 74 and 95; 74 and 96; 74 and 97; 74 and 98; 74 and 99; 74 and 100; 74 and 101; 74 and 102; 75 and 76; 75 and 77; 75 and 78; 75 and 84; 75 and 85; 75 and 86; 75 and 87; 75 and 88; 75 and 89; 75 and 90; 75 and 91; 75 and 92; 75 and 93; 75 and 94; 75 and 95; 75 and 96; 75 and 97; 75 and 98; 75 and 99; 75 and 100; 75 and 101; 75 and 102; 76 and 77; 76 and 78; 76 and 84; 76 and 85; 76 and 86; 76 and 87; 76 and 88; 76 and 89; 76 and 90; 76 and 91; 76 and 92; 76 and 93; 76 and 94; 76 and 95; 76 and 96; 76 and 97; 76 and 98; 76 and 99; 76 and 100; 76 and 101; 76 and 102; 77 and 78; 77 and 84; 77 and 85; 77 and 86; 77 and 87; 77 and 88; 77 and 89; 77 and 90; 77 and 91; 77 and 92; 77 and 93; 77 and 94; 77 and 95; 77 and 96; 77 and 97; 77 and 98; 77 and 99; 77 and 100; 77 and 101; 77 and 102; 78 and 84; 78 and 85; 78 and 86; 78 and 87; 78 and 88; 78 and 89; 78 and 90; 78 and 91; 78 and 92; 78 and 93; 78 and 94; 78 and 95; 78 and 96; 78 and 97; 78 and 98; 78 and 99; 78 and 100; 78 and 101; 78 and 102; 84 and 85; 84 and 86; 84 and 87; 84 and 88; 84 and 89; 84 and 90; 84 and 91; 84 and 92; 84 and 93; 84 and 94; 84 and 95; 84 and 96; 84 and 97; 84 and 98; 84 and 99; 84 and 100; 84 and 101; 84 and 102; 85 and 86; 85 and 87; 85 and 88; 85 and 89; 85 and 90; 85 and 91; 85 and 92; 85 and 93; 85 and 94; 85 and 95; 85 and 96; 85 and 97; 85 and 98; 85 and 99; 85 and 100; 85 and 101; 85 and 102; 86 and 87; 86 and 88; 86 and 89; 86 and 90; 86 and 91; 86 and 92; 86 and 93; 86 and 94; 86 and 95; 86 and 96; 86 and 97; 86 and 98; 86 and 99; 86 and 100; 86 and 101; 86 and 102; 87 and 88; 87 and 89; 87 and 90; 87 and 91; 87 and 92; 87 and 93; 87 and 94; 87 and 95; 87 and 96; 87 and 97; 87 and 98; 87 and 99; 87 and 100; 87 and 101; 87 and 102; 88 and 89; 88 and 90; 88 and 91; 88 and 92; 88 and 93; 88 and 94; 88 and 95; 88 and 96; 88 and 97; 88 and 98; 88 and 99; 88 and 100; 88 and 101; 88 and 102; 89 and 90; 89 and 91; 89 and 92; 89 and 93; 89 and 94; 89 and 95; 89 and 96; 89 and 97; 89 and 98; 89 and 99; 89 and 100; 89 and 101; 89 and 102; 90 and 91; 90 and 92; 90 and 93; 90 and 94; 90 and 95; 90 and 96; 90 and 97; 90 and 98; 90 and 99; 90 and 100; 90 and 101; 90 and 102; 91 and 92; 91 and 93; 91 and 94; 91 and 95; 91 and 96; 91 and 97; 91 and 98; 91 and 99; 91 and 100; 91 and 101; 91 and 102; 92 and 93; 92 and 94; 92 and 95; 92 and 96; 92 and 97; 92 and 98; 92 and 99; 92 and 100; 92 and 101; 92 and 102; 93 and 94; 93 and 95; 93 and 96; 93 and 97; 93 and 98; 93 and 99; 93 and 100; 93 and 101; 93 and 102; 94 and 95; 94 and 96; 94 and 97; 94 and 98; 94 and 99; 94 and 100; 94 and 101; 94 and 102; 95 and 96; 95 and 97; 95 and 98; 95 and 99; 95 and 100; 95 and 101; 95 and 102; 96 and 97; 96 and 98; 96 and 99; 96 and 100; 96 and 101; 96 and 102; 97 and 98; 97 and 99; 97 and 100; 97 and 101; 97 and 102; 98 and 99; 98 and 100; 98 and 101; 98 and 102; 99 and 100; 99 and 101; 99 and 102; 100 and 101; 100 and 102; or 101 and 102;
   [0015] f. For exon 53 with SluCas9, SEQ ID NOs: 270 and 271; 270 and 272; 270 and 273; 270 and 274; 270 and 275; 270 and 276; 270 and 277; 270 and 278; 270 and 279; 270 and 280; 270 and 281; 270 and 282; 270 and 283; 270 and 284; 270 and 285; 270 and 286; 270 and 287; 270 and 288; 270 and 289; 270 and 290; 270 and 291; 270 and 292; 271 and 272; 271 and 273; 271 and 274; 271 and 275; 271 and 276; 271 and 277; 271 and 278; 271 and 279; 271 and 280; 271 and 281; 271 and 282; 271 and 283; 271 and 284; 271 and 285; 271 and 286; 271 and 287; 271 and 288; 271 and 289; 271 and 290; 271 and 291; 271 and 292; 272 and 273; 272 and 274; 272 and 275; 272 and 276; 272 and 277; 272 and 278; 272 and 279; 272 and 280; 272 and 281; 272 and 282; 272 and 283; 272 and 284; 272 and 285; 272 and 286; 272 and 287; 272 and 288; 272 and 289; 272 and 290; 272 and 291; 272 and 292; 273 and 274; 273 and 275; 273 and 276; 273 and 277; 273 and 278; 273 and 279; 273 and 280; 273 and 281; 273 and 282; 273 and 283; 273 and 284; 273 and 285; 273 and 286; 273 and 287; 273 and 288; 273 and 289; 273 and 290; 273 and 291; 273 and 292; 274 and 275; 274 and 276; 274 and 277; 274 and 278; 274 and 279; 274 and 280; 274 and 281; 274 and 282; 274 and 283; 274 and 284; 274 and 285; 274 and 286; 274 and 287; 274 and 288; 274 and 289; 274 and 290; 274 and 291; 274 and 292; 275 and 276; 275 and 277; 275 and 278; 275 and 279; 275 and 280; 275 and 281; 275 and 282; 275 and 283; 275 and 284; 275 and 285; 275 and 286; 275 and 287; 275 and 288; 275 and 289; 275 and 290; 275 and 291; 275 and 292; 276 and 277; 276 and 278; 276 and 279; 276 and 280; 276 and 281; 276 and 282; 276 and 283; 276 and 284; 276 and 285; 276 and 286; 276 and 287; 276 and 288; 276 and 289; 276 and 290; 276 and 291; 276 and 292; 277 and 278; 277 and 279; 277 and 280; 277 and 281; 277 and 282; 277 and 283; 277 and 284; 277 and 285; 277 and 286; 277 and 287; 277 and 288; 277 and 289; 277 and 290; 277 and 291; 277 and 292; 278 and 279; 278 and 280; 278 and 281; 278 and 282; 278 and 283; 278 and 284; 278 and 285; 278 and 286; 278 and 287; 278 and 288; 278 and 289; 278 and 290; 278 and 291; 278 and 292; 279 and 280; 279 and 281; 279 and 282; 279 and 283; 279 and 284; 279 and 285; 279 and 286; 279 and 287; 279 and 288; 279 and 289; 279 and 290; 279 and 291; 279 and 292; 280 and 281; 280 and 282; 280 and 283; 280 and 284; 280 and 285; 280 and 286; 280 and 287; 280 and 288; 280 and 289; 280 and 290; 280 and 291; 280 and 292; 281 and 282; 281 and 283; 281 and 284; 281 and 285; 281 and 286; 281 and 287; 281 and 288; 281 and 289; 281 and 290; 281 and 291; 281 and 292; 282 and 283; 282 and 284; 282 and 285; 282 and 286; 282 and 287; 282 and 288; 282 and 289; 282 and 290; 282 and 291; 282 and 292; 283 and 284; 283 and 285; 283 and 286; 283 and 287; 283 and 288; 283 and 289; 283 and 290; 283 and 291; 283 and 292; 284 and 285; 284 and 286; 284 and 287; 284 and 288; 284 and 289; 284 and 290; 284 and 291; 284 and 292; 285 and 286; 285 and 287; 285 and 288; 285 and 289; 285 and 290; 285 and 291; 285 and 292; 286 and 287; 286 and 288; 286 and 289; 286 and 290; 286 and 291; 286 and 292; 287 and 288; 287 and 289; 287 and 290; 287 and 291; 287 and 292; 288 and 289; 288 and 290; 288 and 291; 288 and 292; 289 and 290; 289 and 291; 289 and 292; 290 and 291; 290 and 292; 291 and 292; 924 and 270; 924 and 272; 924 and 273; 924 and 274; 924 and 275; 924 and 276; 924 and 277; 924 and 278; 924 and 279; 924 and 280; 924 and 281; 924 and 282; 924 and 283; 924 and 284; 924 and 285; 924 and 286; 924 and 287; 924 and 288; 924 and 289; 924 and 290; 924 and 291; 924 and 292; 925 and 270; 925 and 272; 925 and 273; 925 and 274; 925 and 275; 925 and 276; 925 and 277; 925 and 278; 925 and 279; 925 and 280; 925 and 281; 925 and 282; 925 and 283; 925 and 284; 925 and 285; 925 and 286; 925 and 287; 925 and 288; 925 and 289; 925 and 290; 925 and 291; 925 and 292; 926 and 270; 926 and 272; 926 and 273; 926 and 274; 926 and 275; 926 and 276; 926 and 277; 926 and 278; 926 and 279; 926 and 280; 926 and 281; 926 and 282; 926 and 283; 926 and 284; 926 and 285; 926 and 286; 926 and 287; 926 and 288; 926 and 289; 926 and 290; 926 and 291; 926 and 292; 927 and 270; 927 and 272; 927 and 273; 927 and 274; 927 and 275; 927 and 276; 927 and 277; 927 and 278; 927 and 279; 927 and 280; 927 and 281; 927 and 282; 927 and 283; 927 and 284; 927 and 285; 927 and 286; 927 and 287; 927 and 288; 927 and 289; 927 and 290; 927 and 291; 927 and 292; 928 and 270; 928 and 272; 928 and 273; 928 and 274; 928 and 275; 928 and 276; 928 and 277; 928 and 278; 928 and 279; 928 and 280; 928 and 281; 928 and 282; 928 and 283; 928 and 284; 928 and 285; 928 and 286; 928 and 287; 928 and 288; 928 and 289; 928 and 290; 928 and 291; 928 and 292; 929 and 270; 929 and 272; 929 and 273; 929 and 274; 929 and 275; 929 and 276; 929 and 277; 929 and 278; 929 and 279; 929 and 280; 929 and 281; 929 and 282; 929 and 283; 929 and 284; 929 and 285; 929 and 286; 929 and 287; 929 and 288; 929 and 289; 929 and 290; 929 and 291; 929 and 292; 930 and 270; 930 and 272; 930 and 273; 930 and 274; 930 and 275; 930 and 276; 930 and 277; 930 and 278; 930 and 279; 930 and 280; 930 and 281; 930 and 282; 930 and 283; 930 and 284; 930 and 285; 930 and 286; 930 and 287; 930 and 288; 930 and 289; 930 and 290; 930 and 291; 930 and 292; 931 and 270; 931 and 272; 931 and 273; 931 and 274; 931 and 275; 931 and 276; 931 and 277; 931 and 278; 931 and 279; 931 and 280; 931 and 281; 931 and 282; 931 and 283; 931 and 284; 931 and 285; 931 and 286; 931 and 287; 931 and 288; 931 and 289; 931 and 290; 931 and 291; 931 and 292; 932 and 270; 932 and 272; 932 and 273; 932 and 274; 932 and 275; 932 and 276; 932 and 277; 932 and 278; 932 and 279; 932 and 280; 932 and 281; 932 and 282; 932 and 283; 932 and 284; 932 and 285; 932 and 286; 932 and 287; 932 and 288; 932 and 289; 932 and 290; 932 and 291; 932 and 292; 933 and 270; 933 and 272; 933 and 273; 933 and 274; 933 and 275; 933 and 276; 933 and 277; 933 and 278; 933 and 279; 933 and 280; 933 and 281; 933 and 282; 933 and 283; 933 and 284; 933 and 285; 933 and 286; 933 and 287; 933 and 288; 933 and 289; 933 and 290; 933 and 291; 933 and 292; 934 and 270; 934 and 272; 934 and 273; 934 and 274; 934 and 275; 934 and 276; 934 and 277; 934 and 278; 934 and 279; 934 and 280; 934 and 281; 934 and 282; 934 and 283; 934 and 284; 934 and 285; 934 and 286; 934 and 287; 934 and 288; 934 and 289; 934 and 290; 934 and 291; 934 and 292; 935 and 270; 935 and 272; 935 and 273; 935 and 274; 935 and 275; 935 and 276; 935 and 277; 935 and 278; 935 and 279; 935 and 280; 935 and 281; 935 and 282; 935 and 283; 935 and 284; 935 and 285; 935 and 286; 935 and 287; 935 and 288; 935 and 289; 935 and 290; 935 and 291; 935 and 292; 936 and 270; 936 and 272; 936 and 273; 936 and 274; 936 and 275; 936 and 276; 936 and 277; 936 and 278; 936 and 279; 936 and 280; 936 and 281; 936 and 282; 936 and 283; 936 and 284; 936 and 285; 936 and 286; 936 and 287; 936 and 288; 936 and 289; 936 and 290; 936 and 291; 936 and 292; 937 and 270; 937 and 272; 937 and 273; 937 and 274; 937 and 275; 937 and 276; 937 and 277; 937 and 278; 937 and 279; 937 and 280; 937 and 281; 937 and 282; 937 and 283; 937 and 284; 937 and 285; 937 and 286; 937 and 287; 937 and 288; 937 and 289; 937 and 290; 937 and 291; 937 and 292; 938 and 270; 938 and 272; 938 and 273; 938 and 274; 938 and 275; 938 and 276; 938 and 277; 938 and 278; 938 and 279; 938 and 280; 938 and 281; 938 and 282; 938 and 283; 938 and 284; 938 and 285; 938 and 286; 938 and 287; 938 and 288; 938 and 289; 938 and 290; 938 and 291; 938 and 292; 950 and 275; 951 and 275; 952 and 275; 953 and 275; 954 and 275; or 955 and 275.
   [0016] g. For exon 44 with SluCas9, SEQ ID NOs: 200 and 203; 200 and 204; 202 and 203; 202 and 205; 202 and 206; 202 and 207; 204 and 208; 204 and 205; 204 and 206; 204 and 207; or 204 and 208;
   [0017] h. For exon 50 with SluCas9, SEQ ID NOs: 231 and 232; 231 and 234; 231 and 236; 231 and 237; 236 and 233; 236 and 235; 236 and 238; 236 and 240; or 236 and 241;
   [0018] i. For exon 53 with SaCas9, SEQ ID NOs: 86 and 96; 87 and 96; 88 and 97; 89 and 96; 90 and 97; 92 and 77; 92 and 78; 92 and 96; 92 and 99; 93 and 98; 93 and 102; 94 and 100; 95 and 77; 95 and 78; 95 and 99; 96 and 100; 97 and 98; 97 and 102; 98 and 73; or 102 and 73; and
   [0019] j. For exon 53 with SluCas9, SEQ ID NOs: 278 and 290; 278 and 292; 281 and 291; 283 and 290; 283 and 292; 287 and 291; 272 and 290; 290 and 291; or 272 and 292.
[0020] Embodiment 3 is a composition comprising: one or more nucleic acid molecules encoding
   [0021] a. a SaCas9 or SluCas9; and
   [0022] b. a first guide sequence and a second guide sequence, wherein the first and the second guide sequences are selected from any of the following pairs of guide sequences: SEQ ID NO: 1 and SEQ ID NO: 3; SEQ ID NO: 16 and SEQ ID NO: 17; SEQ ID NO: 16 and SEQ ID NO: 18; SEQ ID NO: 16 and SEQ ID NO: 19; SEQ ID NO: 16 and SEQ ID NO: 20; SEQ ID NO: 16 and SEQ ID NO: 21; SEQ ID NO: 16 and SEQ ID NO: 22; SEQ ID NO: 16 and SEQ ID NO: 23; SEQ ID NO: 16 and SEQ ID NO: 24; SEQ ID NO: 16 and SEQ ID NO: 25; SEQ ID NO: 16 and SEQ ID NO: 26; SEQ ID NO: 17 and SEQ ID NO: 18; SEQ ID NO: 17 and SEQ ID NO: 19; SEQ ID NO: 17 and SEQ ID NO: 20; SEQ ID NO: 17 and SEQ ID NO: 21; SEQ ID NO: 17 and SEQ ID NO: 22; SEQ ID NO: 17 and SEQ ID NO: 23; SEQ ID NO: 17 and SEQ ID NO: 24; SEQ ID NO: 17 and SEQ ID NO: 25; SEQ ID NO: 17 and SEQ ID NO: 26; SEQ ID NO: 18 and SEQ ID NO: 19; SEQ ID NO: 18 and SEQ ID NO: 20; SEQ ID NO: 18 and SEQ ID NO: 21; SEQ ID NO: 18 and SEQ ID NO: 22; SEQ ID NO: 18 and SEQ ID NO: 23; SEQ ID NO: 18 and SEQ ID NO: 24; SEQ ID NO: 18 and SEQ ID NO: 25; SEQ ID NO: 18 and SEQ ID NO: 26; SEQ ID NO: 19 and SEQ ID NO: 20; SEQ ID NO: 19 and SEQ ID NO: 21; SEQ ID NO: 19 and SEQ ID NO: 22; SEQ ID NO: 19 and SEQ ID NO: 23; SEQ ID NO: 19 and SEQ ID NO: 24; SEQ ID NO: 19 and SEQ ID NO: 25; SEQ ID NO: 19 and SEQ ID NO: 26; SEQ ID NO: 20 and SEQ ID NO: 21; SEQ ID NO: 20 and SEQ ID NO: 22; SEQ ID NO: 20 and SEQ ID NO: 23; SEQ ID NO: 20 and SEQ ID NO: 24; SEQ ID NO: 20 and SEQ ID NO: 25; SEQ ID NO: 20 and SEQ ID NO: 26; SEQ ID NO: 21 and SEQ ID NO: 22; SEQ ID NO: 21 and SEQ ID NO: 23; SEQ ID NO: 21 and SEQ ID NO: 24; SEQ ID NO: 21 and SEQ ID NO: 25; SEQ ID NO: 21 and SEQ ID NO: 26; SEQ ID NO: 22 and SEQ ID NO: 23; SEQ ID NO: 22 and SEQ ID NO: 24; SEQ ID NO: 22 and SEQ ID NO: 25; SEQ ID NO: 22 and SEQ ID NO: 26; SEQ ID NO: 23 and SEQ ID NO: 24; SEQ ID NO: 23 and SEQ ID NO: 25; SEQ ID NO: 23 and SEQ ID NO: 26; SEQ ID NO: 24 and SEQ ID NO: 25; SEQ ID NO: 24 and SEQ ID NO: 26; SEQ ID NO: 25 and SEQ ID NO: 26; SEQ ID NO: 110 and SEQ ID NO: 120; SEQ ID NO: 110 and SEQ ID NO: 121; SEQ ID NO: 110 and SEQ ID NO: 122; SEQ ID NO: 110 and SEQ ID NO: 123; SEQ ID NO: 110 and SEQ ID NO: 124; SEQ ID NO: 110 and SEQ ID NO: 125; SEQ ID NO: 111 and SEQ ID NO: 112; SEQ ID NO: 111 and SEQ ID NO: 113; SEQ ID NO: 111 and SEQ ID NO: 114; SEQ ID NO: 111 and SEQ ID NO: 115; SEQ ID NO: 111 and SEQ ID NO: 116; SEQ ID NO: 111 and SEQ ID NO: 117; SEQ ID NO: 111 and SEQ ID NO: 118; SEQ ID NO: 111 and SEQ ID NO: 119; SEQ ID NO: 111 and SEQ ID NO: 120; SEQ ID NO: 111 and SEQ ID NO: 121; SEQ ID NO: 111 and SEQ ID NO: 122; SEQ ID NO: 111 and SEQ ID NO: 123; SEQ ID NO: 111 and SEQ ID NO: 124; SEQ ID NO: 111 and SEQ ID NO: 125; SEQ ID NO: 112 and SEQ ID NO: 113; SEQ ID NO: 112 and SEQ ID NO: 114; SEQ ID NO: 112 and SEQ ID NO: 115; SEQ ID NO: 112 and SEQ ID NO: 116; SEQ ID NO: 112 and SEQ ID NO: 117; SEQ ID NO: 112 and SEQ ID NO: 118; SEQ ID NO: 112 and SEQ ID NO: 119; SEQ ID NO: 112 and SEQ ID NO: 120; SEQ ID NO: 112 and SEQ ID NO: 121; SEQ ID NO: 112 and SEQ ID NO: 122; SEQ ID NO: 112 and SEQ ID NO: 123; SEQ ID NO: 112 and SEQ ID NO: 124; SEQ ID NO: 112 and SEQ ID NO: 125; SEQ ID NO: 113 and SEQ ID NO: 114; SEQ ID NO: 113 and SEQ ID NO: 115; SEQ ID NO: 113 and SEQ ID NO: 116; SEQ ID NO: 113 and SEQ ID NO: 117; SEQ ID NO: 113 and SEQ ID NO: 118; SEQ ID NO: 113 and SEQ ID NO: 119; SEQ ID NO: 113 and SEQ ID NO: 120; SEQ ID NO: 113 and SEQ ID NO: 121; SEQ ID NO: 113 and SEQ ID NO: 122; SEQ ID NO: 113 and SEQ ID NO: 123; SEQ ID NO: 113 and SEQ ID NO: 124; SEQ ID NO: 113 and SEQ ID NO: 125; SEQ ID NO: 114 and SEQ ID NO: 115; SEQ ID NO: 114 and SEQ ID NO: 116; SEQ ID NO: 114 and SEQ ID NO: 117; SEQ ID NO: 114 and SEQ ID NO: 118; SEQ ID NO: 114 and SEQ ID NO: 119; SEQ ID NO: 114 and SEQ ID NO: 120; SEQ ID NO: 114 and SEQ ID NO: 121; SEQ ID NO: 114 and SEQ ID NO: 122; SEQ ID NO: 114 and SEQ ID NO: 123; SEQ ID NO: 114 and SEQ ID NO: 124; SEQ ID NO: 114 and SEQ ID NO: 125; SEQ ID NO: 115 and SEQ ID NO: 116; SEQ ID NO: 115 and SEQ ID NO: 117; SEQ ID NO: 115 and SEQ ID NO: 118; SEQ ID NO: 115 and SEQ ID NO: 119; SEQ ID NO: 115 and SEQ ID NO: 120; SEQ ID NO: 115 and SEQ ID NO: 121; SEQ ID NO: 115 and SEQ ID NO: 122; SEQ ID NO: 115 and SEQ ID NO: 123; SEQ ID NO: 115 and SEQ ID NO: 124; SEQ ID NO: 115 and SEQ ID NO: 125; SEQ ID NO: 116 and SEQ ID NO: 117; SEQ ID NO: 116 and SEQ ID NO: 118; SEQ ID NO: 116 and SEQ ID NO: 119; SEQ ID NO: 116 and SEQ ID NO: 120; SEQ ID NO: 116 and SEQ ID NO: 121; SEQ ID NO: 116 and SEQ ID NO: 122; SEQ ID NO: 116 and SEQ ID NO: 123; SEQ ID NO: 116 and SEQ ID NO: 124; SEQ ID NO: 116 and SEQ ID NO: 125; SEQ ID NO: 117 and SEQ ID NO: 118; SEQ ID NO: 117 and SEQ ID NO: 119; SEQ ID NO: 117 and SEQ ID NO: 120; SEQ ID NO: 117 and SEQ ID NO: 121; SEQ ID NO: 117 and SEQ ID NO: 122; SEQ ID NO: 117 and SEQ ID NO: 123; SEQ ID NO: 117 and SEQ ID NO: 124; SEQ ID NO: 117 and SEQ ID NO: 125; SEQ ID NO: 118 and SEQ ID NO: 119; SEQ ID NO: 118 and SEQ ID NO: 120; SEQ ID NO: 118 and SEQ ID NO: 121; SEQ ID NO: 118 and SEQ ID NO: 122; SEQ ID NO: 118 and SEQ ID NO: 123; SEQ ID NO: 118 and SEQ ID NO: 124; SEQ ID NO: 118 and SEQ ID NO: 125; SEQ ID NO: 119 and SEQ ID NO: 120; SEQ ID NO: 119 and SEQ ID NO: 121; SEQ ID NO: 119 and SEQ ID NO: 122; SEQ ID NO: 119 and SEQ ID NO: 123; SEQ ID NO: 119 and SEQ ID NO: 124; SEQ ID NO: 119 and SEQ ID NO: 125; SEQ ID NO: 120 and SEQ ID NO: 121; SEQ ID NO: 120 and SEQ ID NO: 122; SEQ ID NO: 120 and SEQ ID NO: 123; SEQ ID NO: 120 and SEQ ID NO: 124; SEQ ID NO: 120 and SEQ ID NO: 125; SEQ ID NO: 121 and SEQ ID NO: 122; SEQ ID NO: 121 and SEQ ID NO: 123; SEQ ID NO: 121 and SEQ ID NO: 124; SEQ ID NO: 121 and SEQ ID NO: 125; SEQ ID NO: 122 and SEQ ID NO: 123; SEQ ID NO: 122 and SEQ ID NO: 124; SEQ ID NO: 122 and SEQ ID NO: 125; SEQ ID NO: 123 and SEQ ID NO: 124; SEQ ID NO: 123 and SEQ ID NO: 125; SEQ ID NO: 124 and SEQ ID NO: 125; SEQ ID NO: 148 and SEQ ID NO: 149; SEQ ID NO: 148 and SEQ ID NO: 150; SEQ ID NO: 148 and SEQ ID NO: 151; SEQ ID NO: 148 and SEQ ID NO: 152; SEQ ID NO: 148 and SEQ ID NO: 153; SEQ ID NO: 148 and SEQ ID NO: 154; SEQ ID NO: 148 and SEQ ID NO: 155; SEQ ID NO: 148 and SEQ ID NO: 156; SEQ ID NO: 148 and SEQ ID NO: 157; SEQ ID NO: 148 and SEQ ID NO: 158; SEQ ID NO: 148 and SEQ ID NO: 159; SEQ ID NO: 149 and SEQ ID NO: 150; SEQ ID NO: 149 and SEQ ID NO: 151; SEQ ID NO: 149 and SEQ ID NO: 152; SEQ ID NO: 149 and SEQ ID NO: 153; SEQ ID NO: 149 and SEQ ID NO: 154; SEQ ID NO: 149 and SEQ ID NO: 155; SEQ ID NO: 149 and SEQ ID NO: 156; SEQ ID NO: 149 and SEQ ID NO: 157; SEQ ID NO: 149 and SEQ ID NO: 158; SEQ ID NO: 149 and SEQ ID NO: 159; SEQ ID NO: 150 and SEQ ID NO: 151; SEQ ID NO: 150 and SEQ ID NO: 152; SEQ ID NO: 150 and SEQ ID NO: 153; SEQ ID NO: 150 and SEQ ID NO: 154; SEQ ID NO: 150 and SEQ ID NO: 155; SEQ ID NO: 150 and SEQ ID NO: 156; SEQ ID NO: 150 and SEQ ID NO: 157; SEQ ID NO: 150 and SEQ ID NO: 158; SEQ ID NO: 150 and SEQ ID NO: 159; SEQ ID NO: 151 and SEQ ID NO: 152; SEQ ID NO: 151 and SEQ ID NO: 153; SEQ ID NO: 151 and SEQ ID NO: 154; SEQ ID NO: 151 and SEQ ID NO: 155; SEQ ID NO: 151 and SEQ ID NO: 156; SEQ ID NO: 151 and SEQ ID NO: 157; SEQ ID NO: 151 and SEQ ID NO: 158; SEQ ID NO: 151 and SEQ ID NO: 159; SEQ ID NO: 152 and SEQ ID NO: 153; SEQ ID NO: 152 and SEQ ID NO: 154; SEQ ID NO: 152 and SEQ ID NO: 155; SEQ ID NO: 152 and SEQ ID NO: 156; SEQ ID NO: 152 and SEQ ID NO: 157; SEQ ID NO: 152 and SEQ ID NO: 158; SEQ ID NO: 152 and SEQ ID NO: 159; SEQ ID NO: 153 and SEQ ID NO: 154; SEQ ID NO: 153 and SEQ ID NO: 155; SEQ ID NO: 153 and SEQ ID NO: 156; SEQ ID NO: 153 and SEQ ID NO: 157; SEQ ID NO: 153 and SEQ ID NO: 158; SEQ ID NO: 153 and SEQ ID NO: 159; SEQ ID NO: 154 and SEQ ID NO: 155; SEQ ID NO: 154 and SEQ ID NO: 156; SEQ ID NO: 154 and SEQ ID NO: 157; SEQ ID NO: 154 and SEQ ID NO: 158; SEQ ID NO: 154 and SEQ ID NO: 159; SEQ ID NO: 155 and SEQ ID NO: 156; SEQ ID NO: 155 and SEQ ID NO: 157; SEQ ID NO: 155 and SEQ ID NO: 158; SEQ ID NO: 155 and SEQ ID NO: 159; SEQ ID NO: 156 and SEQ ID NO: 157; SEQ ID NO: 156 and SEQ ID NO: 158; SEQ ID NO: 156 and SEQ ID NO: 159; SEQ ID NO: 157 and SEQ ID NO: 158; SEQ ID NO: 157 and SEQ ID NO: 159; SEQ ID NO: 158 and SEQ ID NO: 159; SEQ ID NO: 71 and SEQ ID NO: 72; SEQ ID NO: 71 and SEQ ID NO: 73; SEQ ID NO: 71 and SEQ ID NO: 74; SEQ ID NO: 71 and SEQ ID NO: 75; SEQ ID NO: 71 and SEQ ID NO: 76; SEQ ID NO: 71 and SEQ ID NO: 77; SEQ ID NO: 71 and SEQ ID NO: 78; SEQ ID NO: 71 and SEQ ID NO: 84; SEQ ID NO: 71 and SEQ ID NO: 85; SEQ ID NO: 71 and SEQ ID NO: 86; SEQ ID NO: 71 and SEQ ID NO: 87; SEQ ID NO: 71 and SEQ ID NO: 88; SEQ ID NO: 71 and SEQ ID NO: 89; SEQ ID NO: 71 and SEQ ID NO: 90; SEQ ID NO: 71 and SEQ ID NO: 91; SEQ ID NO: 71 and SEQ ID NO: 92; SEQ ID NO: 71 and SEQ ID NO: 93; SEQ ID NO: 71 and SEQ ID NO: 94; SEQ ID NO: 71 and SEQ ID NO: 95; SEQ ID NO: 71 and SEQ ID NO: 96; SEQ ID NO: 71 and SEQ ID NO: 97; SEQ ID NO: 71 and SEQ ID NO: 98; SEQ ID NO: 71 and SEQ ID NO: 99; SEQ ID NO: 71 and SEQ ID NO: 100; SEQ ID NO: 71 and SEQ ID NO: 101; SEQ ID NO: 71 and SEQ ID NO: 102; SEQ ID NO: 72 and SEQ ID NO: 73; SEQ ID NO: 72 and SEQ ID NO: 74; SEQ ID NO: 72 and SEQ ID NO: 75; SEQ ID NO: 72 and SEQ ID NO: 76; SEQ ID NO: 72 and SEQ ID NO: 77; SEQ ID NO: 72 and SEQ ID NO: 78; SEQ ID NO: 72 and SEQ ID NO: 84; SEQ ID NO: 72 and SEQ ID NO: 85; SEQ ID NO: 72 and SEQ ID NO: 86; SEQ ID NO: 72 and SEQ ID NO: 87; SEQ ID NO: 72 and SEQ ID NO: 88; SEQ ID NO: 72 and SEQ ID NO: 89; SEQ ID NO: 72 and SEQ ID NO: 90; SEQ ID NO: 72 and SEQ ID NO: 91; SEQ ID NO: 72 and SEQ ID NO: 92; SEQ ID NO: 72 and SEQ ID NO: 93; SEQ ID NO: 72 and SEQ ID NO: 94; SEQ ID NO: 72 and SEQ ID NO: 95; SEQ ID NO: 72 and SEQ ID NO: 96; SEQ ID NO: 72 and SEQ ID NO: 97; SEQ ID NO: 72 and SEQ ID NO: 98; SEQ ID NO: 72 and SEQ ID NO: 99; SEQ ID NO: 72 and SEQ ID NO: 100; SEQ ID NO: 72 and SEQ ID NO: 101; SEQ ID NO: 72 and SEQ ID NO: 102; SEQ ID NO: 73 and SEQ ID NO: 74; SEQ ID NO: 73 and SEQ ID NO: 75; SEQ ID NO: 73 and SEQ ID NO: 76; SEQ ID NO: 73 and SEQ ID NO: 77; SEQ ID NO: 73 and SEQ ID NO: 78; SEQ ID NO: 73 and SEQ ID NO: 84; SEQ ID NO: 73 and SEQ ID NO: 85; SEQ ID NO: 73 and SEQ ID NO: 86; SEQ ID NO: 73 and SEQ ID NO: 87; SEQ ID NO: 73 and SEQ ID NO: 88; SEQ ID NO: 73 and SEQ ID NO: 89; SEQ ID NO: 73 and SEQ ID NO: 90; SEQ ID NO: 73 and SEQ ID NO: 91; SEQ ID NO: 73 and SEQ ID NO: 92; SEQ ID NO: 73 and SEQ ID NO: 93; SEQ ID NO: 73 and SEQ ID NO: 94; SEQ ID NO: 73 and SEQ ID NO: 95; SEQ ID NO: 73 and SEQ ID NO: 96; SEQ ID NO: 73 and SEQ ID NO: 97; SEQ ID NO: 73 and SEQ ID NO: 98; SEQ ID NO: 73 and SEQ ID NO: 99; SEQ ID NO: 73 and SEQ ID NO: 100; SEQ ID NO: 73 and SEQ ID NO: 101; SEQ ID NO: 73 and SEQ ID NO: 102; SEQ ID NO: 74 and SEQ ID NO: 75; SEQ ID NO: 74 and SEQ ID NO: 76; SEQ ID NO: 74 and SEQ ID NO: 77; SEQ ID NO: 74 and SEQ ID NO: 78; SEQ ID NO: 74 and SEQ ID NO: 84; SEQ ID NO: 74 and SEQ ID NO: 85; SEQ ID NO: 74 and SEQ ID NO: 86; SEQ ID NO: 74 and SEQ ID NO: 87; SEQ ID NO: 74 and SEQ ID NO: 88; SEQ ID NO: 74 and SEQ ID NO: 89; SEQ ID NO: 74 and SEQ ID NO: 90; SEQ ID NO: 74 and SEQ ID NO: 91; SEQ ID NO: 74 and SEQ ID NO: 92; SEQ ID NO: 74 and SEQ ID NO: 93; SEQ ID NO: 74 and SEQ ID NO: 94; SEQ ID NO: 74 and SEQ ID NO: 95; SEQ ID NO: 74 and SEQ ID NO: 96; SEQ ID NO: 74 and SEQ ID NO: 97; SEQ ID NO: 74 and SEQ ID NO: 98; SEQ ID NO: 74 and SEQ ID NO: 99; SEQ ID NO: 74 and SEQ ID NO: 100; SEQ ID NO: 74 and SEQ ID NO: 101; SEQ ID NO: 74 and SEQ ID NO: 102; SEQ ID NO: 75 and SEQ ID NO: 76; SEQ ID NO: 75 and SEQ ID NO: 77; SEQ ID NO: 75 and SEQ ID NO: 78; SEQ ID NO: 75 and SEQ ID NO: 84; SEQ ID NO: 75 and SEQ ID NO: 85; SEQ ID NO: 75 and SEQ ID NO: 86; SEQ ID NO: 75 and SEQ ID NO: 87; SEQ ID NO: 75 and SEQ ID NO: 88; SEQ ID NO: 75 and SEQ ID NO: 89; SEQ ID NO: 75 and SEQ ID NO: 90; SEQ ID NO: 75 and SEQ ID NO: 91; SEQ ID NO: 75 and SEQ ID NO: 92; SEQ ID NO: 75 and SEQ ID NO: 93; SEQ ID NO: 75 and SEQ ID NO: 94; SEQ ID NO: 75 and SEQ ID NO: 95; SEQ ID NO: 75 and SEQ ID NO: 96; SEQ ID NO: 75 and SEQ ID NO: 97; SEQ ID NO: 75 and SEQ ID NO: 98; SEQ ID NO: 75 and SEQ ID NO: 99; SEQ ID NO: 75 and SEQ ID NO: 100; SEQ ID NO: 75 and SEQ ID NO: 101; SEQ ID NO: 75 and SEQ ID NO: 102; SEQ ID NO: 76 and SEQ ID NO: 77; SEQ ID NO: 76 and SEQ ID NO: 78; SEQ ID NO: 76 and SEQ ID NO: 84; SEQ ID NO: 76 and SEQ ID NO: 85; SEQ ID NO: 76 and SEQ ID NO: 86; SEQ ID NO: 76 and SEQ ID NO: 87; SEQ ID NO: 76 and SEQ ID NO: 88; SEQ ID NO: 76 and SEQ ID NO: 89; SEQ ID NO: 76 and SEQ ID NO: 90; SEQ ID NO: 76 and SEQ ID NO: 91; SEQ ID NO: 76 and SEQ ID NO: 92; SEQ ID NO: 76 and SEQ ID NO: 93; SEQ ID NO: 76 and SEQ ID NO: 94; SEQ ID NO: 76 and SEQ ID NO: 95; SEQ ID NO: 76 and SEQ ID NO: 96; SEQ ID NO: 76 and SEQ ID NO: 97; SEQ ID NO: 76 and SEQ ID NO: 98; SEQ ID NO: 76 and SEQ ID NO: 99; SEQ ID NO: 76 and SEQ ID NO: 100; SEQ ID NO: 76 and SEQ ID NO: 101; SEQ ID NO: 76 and SEQ ID NO: 102; SEQ ID NO: 77 and SEQ ID NO: 78; SEQ ID NO: 77 and SEQ ID NO: 84; SEQ ID NO: 77 and SEQ ID NO: 85; SEQ ID NO: 77 and SEQ ID NO: 86; SEQ ID NO: 77 and SEQ ID NO: 87; SEQ ID NO: 77 and SEQ ID NO: 88; SEQ ID NO: 77 and SEQ ID NO: 89; SEQ ID NO: 77 and SEQ ID NO: 90; SEQ ID NO: 77 and SEQ ID NO: 91; SEQ ID NO: 77 and SEQ ID NO: 92; SEQ ID NO: 77 and SEQ ID NO: 93; SEQ ID NO: 77 and SEQ ID NO: 94; SEQ ID NO: 77 and SEQ ID NO: 95; SEQ ID NO: 77 and SEQ ID NO: 96; SEQ ID NO: 77 and SEQ ID NO: 97; SEQ ID NO: 77 and SEQ ID NO: 98; SEQ ID NO: 77 and SEQ ID NO: 99; SEQ ID NO: 77 and SEQ ID NO: 100; SEQ ID NO: 77 and SEQ ID NO: 101; SEQ ID NO: 77 and SEQ ID NO: 102; SEQ ID NO: 78 and SEQ ID NO: 84; SEQ ID NO: 78 and SEQ ID NO: 85; SEQ ID NO: 78 and SEQ ID NO: 86; SEQ ID NO: 78 and SEQ ID NO: 87; SEQ ID NO: 78 and SEQ ID NO: 88; SEQ ID NO: 78 and SEQ ID NO: 89; SEQ ID NO: 78 and SEQ ID NO: 90; SEQ ID NO: 78 and SEQ ID NO: 91; SEQ ID NO: 78 and SEQ ID NO: 92; SEQ ID NO: 78 and SEQ ID NO: 93; SEQ ID NO: 78 and SEQ ID NO: 94; SEQ ID NO: 78 and SEQ ID NO: 95; SEQ ID NO: 78 and SEQ ID NO: 96; SEQ ID NO: 78 and SEQ ID NO: 97; SEQ ID NO: 78 and SEQ ID NO: 98; SEQ ID NO: 78 and SEQ ID NO: 99; SEQ ID NO: 78 and SEQ ID NO: 100; SEQ ID NO: 78 and SEQ ID NO: 101; SEQ ID NO: 78 and SEQ ID NO: 102; SEQ ID NO: 84 and SEQ ID NO: 85; SEQ ID NO: 84 and SEQ ID NO: 86; SEQ ID NO: 84 and SEQ ID NO: 87; SEQ ID NO: 84 and SEQ ID NO: 88; SEQ ID NO: 84 and SEQ ID NO: 89; SEQ ID NO: 84 and SEQ ID NO: 90; SEQ ID NO: 84 and SEQ ID NO: 91; SEQ ID NO: 84 and SEQ ID NO: 92; SEQ ID NO: 84 and SEQ ID NO: 93; SEQ ID NO: 84 and SEQ ID NO: 94; SEQ ID NO: 84 and SEQ ID NO: 95; SEQ ID NO: 84 and SEQ ID NO: 96; SEQ ID NO: 84 and SEQ ID NO: 97; SEQ ID NO: 84 and SEQ ID NO: 98; SEQ ID NO: 84 and SEQ ID NO: 99; SEQ ID NO: 84 and SEQ ID NO: 100; SEQ ID NO: 84 and SEQ ID NO: 101; SEQ ID NO: 84 and SEQ ID NO: 102; SEQ ID NO: 85 and SEQ ID NO: 86; SEQ ID NO: 85 and SEQ ID NO: 87; SEQ ID NO: 85 and SEQ ID NO: 88; SEQ ID NO: 85 and SEQ ID NO: 89; SEQ ID NO: 85 and SEQ ID NO: 90; SEQ ID NO: 85 and SEQ ID NO: 91; SEQ ID NO: 85 and SEQ ID NO: 92; SEQ ID NO: 85 and SEQ ID NO: 93; SEQ ID NO: 85 and SEQ ID NO: 94; SEQ ID NO: 85 and SEQ ID NO: 95; SEQ ID NO: 85 and SEQ ID NO: 96; SEQ ID NO: 85 and SEQ ID NO: 97; SEQ ID NO: 85 and SEQ ID NO: 98; SEQ ID NO: 85 and SEQ ID NO: 99; SEQ ID NO: 85 and SEQ ID NO: 100; SEQ ID NO: 85 and SEQ ID NO: 101; SEQ ID NO: 85 and SEQ ID NO: 102; SEQ ID NO: 86 and SEQ ID NO: 87; SEQ ID NO: 86 and SEQ ID NO: 88; SEQ ID NO: 86 and SEQ ID NO: 89; SEQ ID NO: 86 and SEQ ID NO: 90; SEQ ID NO: 86 and SEQ ID NO: 91; SEQ ID NO: 86 and SEQ ID NO: 92; SEQ ID NO: 86 and SEQ ID NO: 93; SEQ ID NO: 86 and SEQ ID NO: 94; SEQ ID NO: 86 and SEQ ID NO: 95; SEQ ID NO: 86 and SEQ ID NO: 96; SEQ ID NO: 86 and SEQ ID NO: 97; SEQ ID NO: 86 and SEQ ID NO: 98; SEQ ID NO: 86 and SEQ ID NO: 99; SEQ ID NO: 86 and SEQ ID NO: 100; SEQ ID NO: 86 and SEQ ID NO: 101; SEQ ID NO: 86 and SEQ ID NO: 102; SEQ ID NO: 87 and SEQ ID NO: 88; SEQ ID NO: 87 and SEQ ID NO: 89; SEQ ID NO: 87 and SEQ ID NO: 90; SEQ ID NO: 87 and SEQ ID NO: 91; SEQ ID NO: 87 and SEQ ID NO: 92; SEQ ID NO: 87 and SEQ ID NO: 93; SEQ ID NO: 87 and SEQ ID NO: 94; SEQ ID NO: 87 and SEQ ID NO: 95; SEQ ID NO: 87 and SEQ ID NO: 96; SEQ ID NO: 87 and SEQ ID NO: 97; SEQ ID NO: 87 and SEQ ID NO: 98; SEQ ID NO: 87 and SEQ ID NO: 99; SEQ ID NO: 87 and SEQ ID NO: 100; SEQ ID NO: 87 and SEQ ID NO: 101; SEQ ID NO: 87 and SEQ ID NO: 102; SEQ ID NO: 88 and SEQ ID NO: 89; SEQ ID NO: 88 and SEQ ID NO: 90; SEQ ID NO: 88 and SEQ ID NO: 91; SEQ ID NO: 88 and SEQ ID NO: 92; SEQ ID NO: 88 and SEQ ID NO: 93; SEQ ID NO: 88 and SEQ ID NO: 94; SEQ ID NO: 88 and SEQ ID NO: 95; SEQ ID NO: 88 and SEQ ID NO: 96; SEQ ID NO: 88 and SEQ ID NO: 97; SEQ ID NO: 88 and SEQ ID NO: 98; SEQ ID NO: 88 and SEQ ID NO: 99; SEQ ID NO: 88 and SEQ ID NO: 100; SEQ ID NO: 88 and SEQ ID NO: 101; SEQ ID NO: 88 and SEQ ID NO: 102; SEQ ID NO: 89 and SEQ ID NO: 90; SEQ ID NO: 89 and SEQ ID NO: 91; SEQ ID NO: 89 and SEQ ID NO: 92; SEQ ID NO: 89 and SEQ ID NO: 93; SEQ ID NO: 89 and SEQ ID NO: 94; SEQ ID NO: 89 and SEQ ID NO: 95; SEQ ID NO: 89 and SEQ ID NO: 96; SEQ ID NO: 89 and SEQ ID NO: 97; SEQ ID NO: 89 and SEQ ID NO: 98; SEQ ID NO: 89 and SEQ ID NO: 99; SEQ ID NO: 89 and SEQ ID NO: 100; SEQ ID NO: 89 and SEQ ID NO: 101; SEQ ID NO: 89 and SEQ ID NO: 102; SEQ ID NO: 90 and SEQ ID NO: 91; SEQ ID NO: 90 and SEQ ID NO: 92; SEQ ID NO: 90 and SEQ ID NO: 93; SEQ ID NO: 90 and SEQ ID NO: 94; SEQ ID NO: 90 and SEQ ID NO: 95; SEQ ID NO: 90 and SEQ ID NO: 96; SEQ ID NO: 90 and SEQ ID NO: 97; SEQ ID NO: 90 and SEQ ID NO: 98; SEQ ID NO: 90 and SEQ ID NO: 99; SEQ ID NO: 90 and SEQ ID NO: 100; SEQ ID NO: 90 and SEQ ID NO: 101; SEQ ID NO: 90 and SEQ ID NO: 102; SEQ ID NO: 91 and SEQ ID NO: 92; SEQ ID NO: 91 and SEQ ID NO: 93; SEQ ID NO: 91 and SEQ ID NO: 94; SEQ ID NO: 91 and SEQ ID NO: 95; SEQ ID NO: 91 and SEQ ID NO: 96; SEQ ID NO: 91 and SEQ ID NO: 97; SEQ ID NO: 91 and SEQ ID NO: 98; SEQ ID NO: 91 and SEQ ID NO: 99; SEQ ID NO: 91 and SEQ ID NO: 100; SEQ ID NO: 91 and SEQ ID NO: 101; SEQ ID NO: 91 and SEQ ID NO: 102; SEQ ID NO: 92 and SEQ ID NO: 93; SEQ ID NO: 92 and SEQ ID NO: 94; SEQ ID NO: 92 and SEQ ID NO: 95; SEQ ID NO: 92 and SEQ ID NO: 96; SEQ ID NO: 92 and SEQ ID NO: 97; SEQ ID NO: 92 and SEQ ID NO: 98; SEQ ID NO: 92 and SEQ ID NO: 99; SEQ ID NO: 92 and SEQ ID NO: 100; SEQ ID NO: 92 and SEQ ID NO: 101; SEQ ID NO: 92 and SEQ ID NO: 102; SEQ ID NO: 93 and SEQ ID NO: 94; SEQ ID NO: 93 and SEQ ID NO: 95; SEQ ID NO: 93 and SEQ ID NO: 96; SEQ ID NO: 93 and SEQ ID NO: 97; SEQ ID NO: 93 and SEQ ID NO: 98; SEQ ID NO: 93 and SEQ ID NO: 99; SEQ ID NO: 93 and SEQ ID NO: 100; SEQ ID NO: 93 and SEQ ID NO: 101; SEQ ID NO: 93 and SEQ ID NO: 102; SEQ ID NO: 94 and SEQ ID NO: 95; SEQ ID NO: 94 and SEQ ID NO: 96; SEQ ID NO: 94 and SEQ ID NO: 97; SEQ ID NO: 94 and SEQ ID NO: 98; SEQ ID NO: 94 and SEQ ID NO: 99; SEQ ID NO: 94 and SEQ ID NO: 100; SEQ ID NO: 94 and SEQ ID NO: 101; SEQ ID NO: 94 and SEQ ID NO: 102; SEQ ID NO: 95 and SEQ ID NO: 96; SEQ ID NO: 95 and SEQ ID NO: 97; SEQ ID NO: 95 and SEQ ID NO: 98; SEQ ID NO: 95 and SEQ ID NO: 99; SEQ ID NO: 95 and SEQ ID NO: 100; SEQ ID NO: 95 and SEQ ID NO: 101; SEQ ID NO: 95 and SEQ ID NO: 102; SEQ ID NO: 96 and SEQ ID NO: 97; SEQ ID NO: 96 and SEQ ID NO: 98; SEQ ID NO: 96 and SEQ ID NO: 99; SEQ ID NO: 96 and SEQ ID NO: 100; SEQ ID NO: 96 and SEQ ID NO: 101; SEQ ID NO: 96 and SEQ ID NO: 102; SEQ ID NO: 97 and SEQ ID NO: 98; SEQ ID NO: 97 and SEQ ID NO: 99; SEQ ID NO: 97 and SEQ ID NO: 100; SEQ ID NO: 97 and SEQ ID NO: 101; SEQ ID NO: 97 and SEQ ID NO: 102; SEQ ID NO: 98 and SEQ ID NO: 99; SEQ ID NO: 98 and SEQ ID NO: 100; SEQ ID NO: 98 and SEQ ID NO: 101; SEQ ID NO: 98 and SEQ ID NO: 102; SEQ ID NO: 99 and SEQ ID NO: 100; SEQ ID NO: 99 and SEQ ID NO: 101; SEQ ID NO: 99 and SEQ ID NO: 102; SEQ ID NO: 100 and SEQ ID NO: 101; SEQ ID NO: 100 and SEQ ID NO: 102; SEQ ID NO: 101 and SEQ ID NO: 102; SEQ ID NO: 200 and SEQ ID NO: 201; SEQ ID NO: 200 and SEQ ID NO: 202; SEQ ID NO: 200 and SEQ ID NO: 203; SEQ ID NO: 200 and SEQ ID NO: 204; SEQ ID NO: 200 and SEQ ID NO: 205; SEQ ID NO: 200 and SEQ ID NO: 206; SEQ ID NO: 200 and SEQ ID NO: 207; SEQ ID NO: 200 and SEQ ID NO: 208; SEQ ID NO: 201 and SEQ ID NO: 202; SEQ ID NO: 201 and SEQ ID NO: 203; SEQ ID NO: 201 and SEQ ID NO: 204; SEQ ID NO: 201 and SEQ ID NO: 205; SEQ ID NO: 201 and SEQ ID NO: 206; SEQ ID NO: 201 and SEQ ID NO: 207; SEQ ID NO: 201 and SEQ ID NO: 208; SEQ ID NO: 202 and SEQ ID NO: 203; SEQ ID NO: 202 and SEQ ID NO: 204; SEQ ID NO: 202 and SEQ ID NO: 205; SEQ ID NO: 202 and SEQ ID NO: 206; SEQ ID NO: 202 and SEQ ID NO: 207; SEQ ID NO: 202 and SEQ ID NO: 208; SEQ ID NO: 203 and SEQ ID NO: 204; SEQ ID NO: 203 and SEQ ID NO: 205; SEQ ID NO: 203 and SEQ ID NO: 206; SEQ ID NO: 203 and SEQ ID NO: 207; SEQ ID NO: 203 and SEQ ID NO: 208; SEQ ID NO: 204 and SEQ ID NO: 205; SEQ ID NO: 204 and SEQ ID NO: 206; SEQ ID NO: 204 and SEQ ID NO: 207; SEQ ID NO: 204 and SEQ ID NO: 208; SEQ ID NO: 205 and SEQ ID NO: 206; SEQ ID NO: 205 and SEQ ID NO: 207; SEQ ID NO: 205 and SEQ ID NO: 208; SEQ ID NO: 206 and SEQ ID NO: 207; SEQ ID NO: 206 and SEQ ID NO: 208; SEQ ID NO: 207 and SEQ ID NO: 208; SEQ ID NO: 231 and SEQ ID NO: 232; SEQ ID NO: 231 and SEQ ID NO: 233; SEQ ID NO: 231 and SEQ ID NO: 234; SEQ ID NO: 231 and SEQ ID NO: 235; SEQ ID NO: 231 and SEQ ID NO: 236; SEQ ID NO: 231 and SEQ ID NO: 237; SEQ ID NO: 231 and SEQ ID NO: 238; SEQ ID NO: 231 and SEQ ID NO: 239; SEQ ID NO: 231 and SEQ ID NO: 240; SEQ ID NO: 231 and SEQ ID NO: 241; SEQ ID NO: 231 and SEQ ID NO: 242; SEQ ID NO: 232 and SEQ ID NO: 233; SEQ ID NO: 232 and SEQ ID NO: 234; SEQ ID NO: 232 and SEQ ID NO: 235; SEQ ID NO: 232 and SEQ ID NO: 236; SEQ ID NO: 232 and SEQ ID NO: 237; SEQ ID NO: 232 and SEQ ID NO: 238; SEQ ID NO: 232 and SEQ ID NO: 239; SEQ ID NO: 232 and SEQ ID NO: 240; SEQ ID NO: 232 and SEQ ID NO: 241; SEQ ID NO: 232 and SEQ ID NO: 242; SEQ ID NO: 233 and SEQ ID NO: 234; SEQ ID NO: 233 and SEQ ID NO: 235; SEQ ID NO: 233 and SEQ ID NO: 236; SEQ ID NO: 233 and SEQ ID NO: 237; SEQ ID NO: 233 and SEQ ID NO: 238; SEQ ID NO: 233 and SEQ ID NO: 239; SEQ ID NO: 233 and SEQ ID NO: 240; SEQ ID NO: 233 and SEQ ID NO: 241; SEQ ID NO: 233 and SEQ ID NO: 242; SEQ ID NO: 234 and SEQ ID NO: 235; SEQ ID NO: 234 and SEQ ID NO: 236; SEQ ID NO: 234 and SEQ ID NO: 237; SEQ ID NO: 234 and SEQ ID NO: 238; SEQ ID NO: 234 and SEQ ID NO: 239; SEQ ID NO: 234 and SEQ ID NO: 240; SEQ ID NO: 234 and SEQ ID NO: 241; SEQ ID NO: 234 and SEQ ID NO: 242; SEQ ID NO: 235 and SEQ ID NO: 236; SEQ ID NO: 235 and SEQ ID NO: 237; SEQ ID NO: 235 and SEQ ID NO: 238; SEQ ID NO: 235 and SEQ ID NO: 239; SEQ ID NO: 235 and SEQ ID NO: 240; SEQ ID NO: 235 and SEQ ID NO: 241; SEQ ID NO: 235 and SEQ ID NO: 242; SEQ ID NO: 236 and SEQ ID NO: 237; SEQ ID NO: 236 and SEQ ID NO: 238; SEQ ID NO: 236 and SEQ ID NO: 239; SEQ ID NO: 236 and SEQ ID NO: 240; SEQ ID NO: 236 and SEQ ID NO: 241; SEQ ID NO: 236 and SEQ ID NO: 242; SEQ ID NO: 237 and SEQ ID NO: 238; SEQ ID NO: 237 and SEQ ID NO: 239; SEQ ID NO: 237 and SEQ ID NO: 240; SEQ ID NO: 237 and SEQ ID NO: 241; SEQ ID NO: 237 and SEQ ID NO: 242; SEQ ID NO: 238 and SEQ ID NO: 239; SEQ ID NO: 238 and SEQ ID NO: 240; SEQ ID NO: 238 and SEQ ID NO: 241; SEQ ID NO: 238 and SEQ ID NO: 242; SEQ ID NO: 239 and SEQ ID NO: 240; SEQ ID NO: 239 and SEQ ID NO: 241; SEQ ID NO: 239 and SEQ ID NO: 242; SEQ ID NO: 240 and SEQ ID NO: 241; SEQ ID NO: 240 and SEQ ID NO: 242; SEQ ID NO: 241 and SEQ ID NO: 242; SEQ ID NO: 270 and SEQ ID NO: 271; SEQ ID NO: 270 and SEQ ID NO: 272; SEQ ID NO: 270 and SEQ ID NO: 273; SEQ ID NO: 270 and SEQ ID NO: 274; SEQ ID NO: 270 and SEQ ID NO: 275; SEQ ID NO: 270 and SEQ ID NO: 276; SEQ ID NO: 270 and SEQ ID NO: 277; SEQ ID NO: 270 and SEQ ID NO: 278; SEQ ID NO: 270 and SEQ ID NO: 279; SEQ ID NO: 270 and SEQ ID NO: 280; SEQ ID NO: 270 and SEQ ID NO: 281; SEQ ID NO: 270 and SEQ ID NO: 282; SEQ ID NO: 270 and SEQ ID NO: 283; SEQ ID NO: 270 and SEQ ID NO: 284; SEQ ID NO: 270 and SEQ ID NO: 285; SEQ ID NO: 270 and SEQ ID NO: 286; SEQ ID NO: 270 and SEQ ID NO: 287; SEQ ID NO: 270 and SEQ ID NO: 288; SEQ ID NO: 270 and SEQ ID NO: 289; SEQ ID NO: 270 and SEQ ID NO: 290; SEQ ID NO: 270 and SEQ ID NO: 291; SEQ ID NO: 270 and SEQ ID NO: 292; SEQ ID NO: 271 and SEQ ID NO: 272; SEQ ID NO: 271 and SEQ ID NO: 273; SEQ ID NO: 271 and SEQ ID NO: 274; SEQ ID NO: 271 and SEQ ID NO: 275; SEQ ID NO: 271 and SEQ ID NO: 276; SEQ ID NO: 271 and SEQ ID NO: 277; SEQ ID NO: 271 and SEQ ID NO: 278; SEQ ID NO: 271 and SEQ ID NO: 279; SEQ ID NO: 271 and SEQ ID NO: 280; SEQ ID NO: 271 and SEQ ID NO: 281; SEQ ID NO: 271 and SEQ ID NO: 282; SEQ ID NO: 271 and SEQ ID NO: 283; SEQ ID NO: 271 and SEQ ID NO: 284; SEQ ID NO: 271 and SEQ ID NO: 285; SEQ ID NO: 271 and SEQ ID NO: 286; SEQ ID NO: 271 and SEQ ID NO: 287; SEQ ID NO: 271 and SEQ ID NO: 288; SEQ ID NO: 271 and SEQ ID NO: 289; SEQ ID NO: 271 and SEQ ID NO: 290; SEQ ID NO: 271 and SEQ ID NO: 291; SEQ ID NO: 271 and SEQ ID NO: 292; SEQ ID NO: 272 and SEQ ID NO: 273; SEQ ID NO: 272 and SEQ ID NO: 274; SEQ ID NO: 272 and SEQ ID NO: 275; SEQ ID NO: 272 and SEQ ID NO: 276; SEQ ID NO: 272 and SEQ ID NO: 277; SEQ ID NO: 272 and SEQ ID NO: 278; SEQ ID NO: 272 and SEQ ID NO: 279; SEQ ID NO: 272 and SEQ ID NO: 280; SEQ ID NO: 272 and SEQ ID NO: 281; SEQ ID NO: 272 and SEQ ID NO: 282; SEQ ID NO: 272 and SEQ ID NO: 283; SEQ ID NO: 272 and SEQ ID NO: 284; SEQ ID NO: 272 and SEQ ID NO: 285; SEQ ID NO: 272 and SEQ ID NO: 286; SEQ ID NO: 272 and SEQ ID NO: 287; SEQ ID NO: 272 and SEQ ID NO: 288; SEQ ID NO: 272 and SEQ ID NO: 289; SEQ ID NO: 272 and SEQ ID NO: 290; SEQ ID NO: 272 and SEQ ID NO: 291; SEQ ID NO: 272 and SEQ ID NO: 292; SEQ ID NO: 273 and SEQ ID NO: 274; SEQ ID NO: 273 and SEQ ID NO: 275; SEQ ID NO: 273 and SEQ ID NO: 276; SEQ ID NO: 273 and SEQ ID NO: 277; SEQ ID NO: 273 and SEQ ID NO: 278; SEQ ID NO: 273 and SEQ ID NO: 279; SEQ ID NO: 273 and SEQ ID NO: 280; SEQ ID NO: 273 and SEQ ID NO: 281; SEQ ID NO: 273 and SEQ ID NO: 282; SEQ ID NO: 273 and SEQ ID NO: 283; SEQ ID NO: 273 and SEQ ID NO: 284; SEQ ID NO: 273 and SEQ ID NO: 285; SEQ ID NO: 273 and SEQ ID NO: 286; SEQ ID NO: 273 and SEQ ID NO: 287; SEQ ID NO: 273 and SEQ ID NO: 288; SEQ ID NO: 273 and SEQ ID NO: 289; SEQ ID NO: 273 and SEQ ID NO: 290; SEQ ID NO: 273 and SEQ ID NO: 291; SEQ ID NO: 273 and SEQ ID NO: 292; SEQ ID NO: 274 and SEQ ID NO: 275; SEQ ID NO: 274 and SEQ ID NO: 276; SEQ ID NO: 274 and SEQ ID NO: 277; SEQ ID NO: 274 and SEQ ID NO: 278; SEQ ID NO: 274 and SEQ ID NO: 279; SEQ ID NO: 274 and SEQ ID NO: 280; SEQ ID NO: 274 and SEQ ID NO: 281; SEQ ID NO: 274 and SEQ ID NO: 282; SEQ ID NO: 274 and SEQ ID NO: 283; SEQ ID NO: 274 and SEQ ID NO: 284; SEQ ID NO: 274 and SEQ ID NO: 285; SEQ ID NO: 274 and SEQ ID NO: 286; SEQ ID NO: 274 and SEQ ID NO: 287; SEQ ID NO: 274 and SEQ ID NO: 288; SEQ ID NO: 274 and SEQ ID NO: 289; SEQ ID NO: 274 and SEQ ID NO: 290; SEQ ID NO: 274 and SEQ ID NO: 291; SEQ ID NO: 274 and SEQ ID NO: 292; SEQ ID NO: 275 and SEQ ID NO: 276; SEQ ID NO: 275 and SEQ ID NO: 277; SEQ ID NO: 275 and SEQ ID NO: 278; SEQ ID NO: 275 and SEQ ID NO: 279; SEQ ID NO: 275 and SEQ ID NO: 280; SEQ ID NO: 275 and SEQ ID NO: 281; SEQ ID NO: 275 and SEQ ID NO: 282; SEQ ID NO: 275 and SEQ ID NO: 283; SEQ ID NO: 275 and SEQ ID NO: 284; SEQ ID NO: 275 and SEQ ID NO: 285; SEQ ID NO: 275 and SEQ ID NO: 286; SEQ ID NO: 275 and SEQ ID NO: 287; SEQ ID NO: 275 and SEQ ID NO: 288; SEQ ID NO: 275 and SEQ ID NO: 289; SEQ ID NO: 275 and SEQ ID NO: 290; SEQ ID NO: 275 and SEQ ID NO: 291; SEQ ID NO: 275 and SEQ ID NO: 292; SEQ ID NO: 276 and SEQ ID NO: 277; SEQ ID NO: 276 and SEQ ID NO: 278; SEQ ID NO: 276 and SEQ ID NO: 279; SEQ ID NO: 276 and SEQ ID NO: 280; SEQ ID NO: 276 and SEQ ID NO: 281; SEQ ID NO: 276 and SEQ ID NO: 282; SEQ ID NO: 276 and SEQ ID NO: 283; SEQ ID NO: 276 and SEQ ID NO: 284; SEQ ID NO: 276 and SEQ ID NO: 285; SEQ ID NO: 276 and SEQ ID NO: 286; SEQ ID NO: 276 and SEQ ID NO: 287; SEQ ID NO: 276 and SEQ ID NO: 288; SEQ ID NO: 276 and SEQ ID NO: 289; SEQ ID NO: 276 and SEQ ID NO: 290; SEQ ID NO: 276 and SEQ ID NO: 291; SEQ ID NO: 276 and SEQ ID NO: 292; SEQ ID NO: 277 and SEQ ID NO: 278; SEQ ID NO: 277 and SEQ ID NO: 279; SEQ ID NO: 277 and SEQ ID NO: 280; SEQ ID NO: 277 and SEQ ID NO: 281; SEQ ID NO: 277 and SEQ ID NO: 282; SEQ ID NO: 277 and SEQ ID NO: 283; SEQ ID NO: 277 and SEQ ID NO: 284; SEQ ID NO: 277 and SEQ ID NO: 285; SEQ ID NO: 277 and SEQ ID NO: 286; SEQ ID NO: 277 and SEQ ID NO: 287; SEQ ID NO: 277 and SEQ ID NO: 288; SEQ ID NO: 277 and SEQ ID NO: 289; SEQ ID NO: 277 and SEQ ID NO: 290; SEQ ID NO: 277 and SEQ ID NO: 291; SEQ ID NO: 277 and SEQ ID NO: 292; SEQ ID NO: 278 and SEQ ID NO: 279; SEQ ID NO: 278 and SEQ ID NO: 280; SEQ ID NO: 278 and SEQ ID NO: 281; SEQ ID NO: 278 and SEQ ID NO: 282; SEQ ID NO: 278 and SEQ ID NO: 283; SEQ ID NO: 278 and SEQ ID NO: 284; SEQ ID NO: 278 and SEQ ID NO: 285; SEQ ID NO: 278 and SEQ ID NO: 286; SEQ ID NO: 278 and SEQ ID NO: 287; SEQ ID NO: 278 and SEQ ID NO: 288; SEQ ID NO: 278 and SEQ ID NO: 289; SEQ ID NO: 278 and SEQ ID NO: 290; SEQ ID NO: 278 and SEQ ID NO: 291; SEQ ID NO: 278 and SEQ ID NO: 292; SEQ ID NO: 279 and SEQ ID NO: 280; SEQ ID NO: 279 and SEQ ID NO: 281; SEQ ID NO: 279 and SEQ ID NO: 282; SEQ ID NO: 279 and SEQ ID NO: 283; SEQ ID NO: 279 and SEQ ID NO: 284; SEQ ID NO: 279 and SEQ ID NO: 285; SEQ ID NO: 279 and SEQ ID NO: 286; SEQ ID NO: 279 and SEQ ID NO: 287; SEQ ID NO: 279 and SEQ ID NO: 288; SEQ ID NO: 279 and SEQ ID NO: 289; SEQ ID NO: 279 and SEQ ID NO: 290; SEQ ID NO: 279 and SEQ ID NO: 291; SEQ ID NO: 279 and SEQ ID NO: 292; SEQ ID NO: 280 and SEQ ID NO: 281; SEQ ID NO: 280 and SEQ ID NO: 282; SEQ ID NO: 280 and SEQ ID NO: 283; SEQ ID NO: 280 and SEQ ID NO: 284; SEQ ID NO: 280 and SEQ ID NO: 285; SEQ ID NO: 280 and SEQ ID NO: 286; SEQ ID NO: 280 and SEQ ID NO: 287; SEQ ID NO: 280 and SEQ ID NO: 288; SEQ ID NO: 280 and SEQ ID NO: 289; SEQ ID NO: 280 and SEQ ID NO: 290; SEQ ID NO: 280 and SEQ ID NO: 291; SEQ ID NO: 280 and SEQ ID NO: 292; SEQ ID NO: 281 and SEQ ID NO: 282; SEQ ID NO: 281 and SEQ ID NO: 283; SEQ ID NO: 281 and SEQ ID NO: 284; SEQ ID NO: 281 and SEQ ID NO: 285; SEQ ID NO: 281 and SEQ ID NO: 286; SEQ ID NO: 281 and SEQ ID NO: 287; SEQ ID NO: 281 and SEQ ID NO: 288; SEQ ID NO: 281 and SEQ ID NO: 289; SEQ ID NO: 281 and SEQ ID NO: 290; SEQ ID NO: 281 and SEQ ID NO: 291; SEQ ID NO: 281 and SEQ ID NO: 292; SEQ ID NO: 282 and SEQ ID NO: 283; SEQ ID NO: 282 and SEQ ID NO: 284; SEQ ID NO: 282 and SEQ ID NO: 285; SEQ ID NO: 282 and SEQ ID NO: 286; SEQ ID NO: 282 and SEQ ID NO: 287; SEQ ID NO: 282 and SEQ ID NO: 288; SEQ ID NO: 282 and SEQ ID NO: 289; SEQ ID NO: 282 and SEQ ID NO: 290; SEQ ID NO: 282 and SEQ ID NO: 291; SEQ ID NO: 282 and SEQ ID NO: 292; SEQ ID NO: 283 and SEQ ID NO: 284; SEQ ID NO: 283 and SEQ ID NO: 285; SEQ ID NO: 283 and SEQ ID NO: 286; SEQ ID NO: 283 and SEQ ID NO: 287; SEQ ID NO: 283 and SEQ ID NO: 288; SEQ ID NO: 283 and SEQ ID NO: 289; SEQ ID NO: 283 and SEQ ID NO: 290; SEQ ID NO: 283 and SEQ ID NO: 291; SEQ ID NO: 283 and SEQ ID NO: 292; SEQ ID NO: 284 and SEQ ID NO: 285; SEQ ID NO: 284 and SEQ ID NO: 286; SEQ ID NO: 284 and SEQ ID NO: 287; SEQ ID NO: 284 and SEQ ID NO: 288; SEQ ID NO: 284 and SEQ ID NO: 289; SEQ ID NO: 284 and SEQ ID NO: 290; SEQ ID NO: 284 and SEQ ID NO: 291; SEQ ID NO: 284 and SEQ ID NO: 292; SEQ ID NO: 285 and SEQ ID NO: 286; SEQ ID NO: 285 and SEQ ID NO: 287; SEQ ID NO: 285 and SEQ ID NO: 288; SEQ ID NO: 285 and SEQ ID NO: 289; SEQ ID NO: 285 and SEQ ID NO: 290; SEQ ID NO: 285 and SEQ ID NO: 291; SEQ ID NO: 285 and SEQ ID NO: 292; SEQ ID NO: 286 and SEQ ID NO: 287; SEQ ID NO: 286 and SEQ ID NO: 288; SEQ ID NO: 286 and SEQ ID NO: 289; SEQ ID NO: 286 and SEQ ID NO: 290; SEQ ID NO: 286 and SEQ ID NO: 291; SEQ ID NO: 286 and SEQ ID NO: 292; SEQ ID NO: 287 and SEQ ID NO: 288; SEQ ID NO: 287 and SEQ ID NO: 289; SEQ ID NO: 287 and SEQ ID NO: 290; SEQ ID NO: 287 and SEQ ID NO: 291; SEQ ID NO: 287 and SEQ ID NO: 292; SEQ ID NO: 288 and SEQ ID NO: 289; SEQ ID NO: 288 and SEQ ID NO: 290; SEQ ID NO: 288 and SEQ ID NO: 291; SEQ ID NO: 288 and SEQ ID NO: 292; SEQ ID NO: 289 and SEQ ID NO: 290; SEQ ID NO: 289 and SEQ ID NO: 291; SEQ ID NO: 289 and SEQ ID NO: 292; SEQ ID NO: 290 and SEQ ID NO: 291; SEQ ID NO: 290 and SEQ ID NO: 292; SEQ ID NO: 291 and SEQ ID NO: 292; SEQ ID NO: 270 and SEQ ID NO: 924; SEQ ID NO: 270 and SEQ ID NO: 925; SEQ ID NO: 270 and SEQ ID NO: 926; SEQ ID NO: 270 and SEQ ID NO: 927; SEQ ID NO: 270 and SEQ ID NO: 928; SEQ ID NO: 270 and SEQ ID NO: 929; SEQ ID NO: 270 and SEQ ID NO: 930; SEQ ID NO: 270 and SEQ ID NO: 931; SEQ ID NO: 270 and SEQ ID NO: 932; SEQ ID NO: 270 and SEQ ID NO: 933; SEQ ID NO: 270 and SEQ ID NO: 934; SEQ ID NO: 270 and SEQ ID NO: 935; SEQ ID NO: 270 and SEQ ID NO: 936; SEQ ID NO: 270 and SEQ ID NO: 937; SEQ ID NO: 270 and SEQ ID NO: 938; SEQ ID NO: 272 and SEQ ID NO: 924; SEQ ID NO: 272 and SEQ ID NO: 925; SEQ ID NO: 272 and SEQ ID NO: 926; SEQ ID NO: 272 and SEQ ID NO: 927; SEQ ID NO: 272 and SEQ ID NO: 928; SEQ ID NO: 272 and SEQ ID NO: 929; SEQ ID NO: 272 and SEQ ID NO: 930; SEQ ID NO: 272 and SEQ ID NO: 931; SEQ ID NO: 272 and SEQ ID NO: 932; SEQ ID NO: 272 and SEQ ID NO: 933; SEQ ID NO: 272 and SEQ ID NO: 934; SEQ ID NO: 272 and SEQ ID NO: 935; SEQ ID NO: 272 and SEQ ID NO: 936; SEQ ID NO: 272 and SEQ ID NO: 937; SEQ ID NO: 272 and SEQ ID NO: 938; SEQ ID NO: 273 and SEQ ID NO: 924; SEQ ID NO: 273 and SEQ ID NO: 925; SEQ ID NO: 273 and SEQ ID NO: 926; SEQ ID NO: 273 and SEQ ID NO: 927; SEQ ID NO: 273 and SEQ ID NO: 928; SEQ ID NO: 273 and SEQ ID NO: 929; SEQ ID NO: 273 and SEQ ID NO: 930; SEQ ID NO: 273 and SEQ ID NO: 931; SEQ ID NO: 273 and SEQ ID NO: 932; SEQ ID NO: 273 and SEQ ID NO: 933; SEQ ID NO: 273 and SEQ ID NO: 934; SEQ ID NO: 273 and SEQ ID NO: 935; SEQ ID NO: 273 and SEQ ID NO: 936; SEQ ID NO: 273 and SEQ ID NO: 937; SEQ ID NO: 273 and SEQ ID NO: 938; SEQ ID NO: 274 and SEQ ID NO: 924; SEQ ID NO: 274 and SEQ ID NO: 925; SEQ ID NO: 274 and SEQ ID NO: 926; SEQ ID NO: 274 and SEQ ID NO: 927; SEQ ID NO: 274 and SEQ ID NO: 928; SEQ ID NO: 274 and SEQ ID NO: 929; SEQ ID NO: 274 and SEQ ID NO: 930; SEQ ID NO: 274 and SEQ ID NO: 931; SEQ ID NO: 274 and SEQ ID NO: 932; SEQ ID NO: 274 and SEQ ID NO: 933; SEQ ID NO: 274 and SEQ ID NO: 934; SEQ ID NO: 274 and SEQ ID NO: 935; SEQ ID NO: 274 and SEQ ID NO: 936; SEQ ID NO: 274 and SEQ ID NO: 937; SEQ ID NO: 274 and SEQ ID NO: 938; SEQ ID NO: 275 and SEQ ID NO: 924; SEQ ID NO: 275 and SEQ ID NO: 925; SEQ ID NO: 275 and SEQ ID NO: 926; SEQ ID NO: 275 and SEQ ID NO: 927; SEQ ID NO: 275 and SEQ ID NO: 928; SEQ ID NO: 275 and SEQ ID NO: 929; SEQ ID NO: 275 and SEQ ID NO: 930; SEQ ID NO: 275 and SEQ ID NO: 931; SEQ ID NO: 275 and SEQ ID NO: 932; SEQ ID NO: 275 and SEQ ID NO: 933; SEQ ID NO: 275 and SEQ ID NO: 934; SEQ ID NO: 275 and SEQ ID NO: 935; SEQ ID NO: 275 and SEQ ID NO: 936; SEQ ID NO: 275 and SEQ ID NO: 937; SEQ ID NO: 275 and SEQ ID NO: 938; SEQ ID NO: 276 and SEQ ID NO: 924; SEQ ID NO: 276 and SEQ ID NO: 925; SEQ ID NO: 276 and SEQ ID NO: 926; SEQ ID NO: 276 and SEQ ID NO: 927; SEQ ID NO: 276 and SEQ ID NO: 928; SEQ ID NO: 276 and SEQ ID NO: 929; SEQ ID NO: 276 and SEQ ID NO: 930; SEQ ID NO: 276 and SEQ ID NO: 931; SEQ ID NO: 276 and SEQ ID NO: 932; SEQ ID NO: 276 and SEQ ID NO: 933; SEQ ID NO: 276 and SEQ ID NO: 934; SEQ ID NO: 276 and SEQ ID NO: 935; SEQ ID NO: 276 and SEQ ID NO: 936; SEQ ID NO: 276 and SEQ ID NO: 937; SEQ ID NO: 276 and SEQ ID NO: 938; SEQ ID NO: 277 and SEQ ID NO: 924; SEQ ID NO: 277 and SEQ ID NO: 925; SEQ ID NO: 277 and SEQ ID NO: 926; SEQ ID NO: 277 and SEQ ID NO: 927; SEQ ID NO: 277 and SEQ ID NO: 928; SEQ ID NO: 277 and SEQ ID NO: 929; SEQ ID NO: 277 and SEQ ID NO: 930; SEQ ID NO: 277 and SEQ ID NO: 931; SEQ ID NO: 277 and SEQ ID NO: 932; SEQ ID NO: 277 and SEQ ID NO: 933; SEQ ID NO: 277 and SEQ ID NO: 934; SEQ ID NO: 277 and SEQ ID NO: 935; SEQ ID NO: 277 and SEQ ID NO: 936; SEQ ID NO: 277 and SEQ ID NO: 937; SEQ ID NO: 277 and SEQ ID NO: 938; SEQ ID NO: 278 and SEQ ID NO: 924; SEQ ID NO: 278 and SEQ ID NO: 925; SEQ ID NO: 278 and SEQ ID NO: 926; SEQ ID NO: 278 and SEQ ID NO: 927; SEQ ID NO: 278 and SEQ ID NO: 928; SEQ ID NO: 278 and SEQ ID NO: 929; SEQ ID NO: 278 and SEQ ID NO: 930; SEQ ID NO: 278 and SEQ ID NO: 931; SEQ ID NO: 278 and SEQ ID NO: 932; SEQ ID NO: 278 and SEQ ID NO: 933; SEQ ID NO: 278 and SEQ ID NO: 934; SEQ ID NO: 278 and SEQ ID NO: 935; SEQ ID NO: 278 and SEQ ID NO: 936; SEQ ID NO: 278 and SEQ ID NO: 937; SEQ ID NO: 278 and SEQ ID NO: 938; SEQ ID NO: 279 and SEQ ID NO: 924; SEQ ID NO: 279 and SEQ ID NO: 925; SEQ ID NO: 279 and SEQ ID NO: 926; SEQ ID NO: 279 and SEQ ID NO: 927; SEQ ID NO: 279 and SEQ ID NO: 928; SEQ ID NO: 279 and SEQ ID NO: 929; SEQ ID NO: 279 and SEQ ID NO: 930; SEQ ID NO: 279 and SEQ ID NO: 931; SEQ ID NO: 279 and SEQ ID NO: 932; SEQ ID NO: 279 and SEQ ID NO: 933; SEQ ID NO: 279 and SEQ ID NO: 934; SEQ ID NO: 279 and SEQ ID NO: 935; SEQ ID NO: 279 and SEQ ID NO: 936; SEQ ID NO: 279 and SEQ ID NO: 937; SEQ ID NO: 279 and SEQ ID NO: 938; SEQ ID NO: 280 and SEQ ID NO: 924; SEQ ID NO: 280 and SEQ ID NO: 925; SEQ ID NO: 280 and SEQ ID NO: 926; SEQ ID NO: 280 and SEQ ID NO: 927; SEQ ID NO: 280 and SEQ ID NO: 928; SEQ ID NO: 280 and SEQ ID NO: 929; SEQ ID NO: 280 and SEQ ID NO: 930; SEQ ID NO: 280 and SEQ ID NO: 931; SEQ ID NO: 280 and SEQ ID NO: 932; SEQ ID NO: 280 and SEQ ID NO: 933; SEQ ID NO: 280 and SEQ ID NO: 934; SEQ ID NO: 280 and SEQ ID NO: 935; SEQ ID NO: 280 and SEQ ID NO: 936; SEQ ID NO: 280 and SEQ ID NO: 937; SEQ ID NO: 280 and SEQ ID NO: 938; SEQ ID NO: 281 and SEQ ID NO: 924; SEQ ID NO: 281 and SEQ ID NO: 925; SEQ ID NO: 281 and SEQ ID NO: 926; SEQ ID NO: 281 and SEQ ID NO: 927; SEQ ID NO: 281 and SEQ ID NO: 928; SEQ ID NO: 281 and SEQ ID NO: 929; SEQ ID NO: 281 and SEQ ID NO: 930; SEQ ID NO: 281 and SEQ ID NO: 931; SEQ ID NO: 281 and SEQ ID NO: 932; SEQ ID NO: 281 and SEQ ID NO: 933; SEQ ID NO: 281 and SEQ ID NO: 934; SEQ ID NO: 281 and SEQ ID NO: 935; SEQ ID NO: 281 and SEQ ID NO: 936; SEQ ID NO: 281 and SEQ ID NO: 937; SEQ ID NO: 281 and SEQ ID NO: 938; SEQ ID NO: 282 and SEQ ID NO: 924; SEQ ID NO: 282 and SEQ ID NO: 925; SEQ ID NO: 282 and SEQ ID NO: 926; SEQ ID NO: 282 and SEQ ID NO: 927; SEQ ID NO: 282 and SEQ ID NO: 928; SEQ ID NO: 282 and SEQ ID NO: 929; SEQ ID NO: 282 and SEQ ID NO: 930; SEQ ID NO: 282 and SEQ ID NO: 931; SEQ ID NO: 282 and SEQ ID NO: 932; SEQ ID NO: 282 and SEQ ID NO: 933; SEQ ID NO: 282 and SEQ ID NO: 934; SEQ ID NO: 282 and SEQ ID NO: 935; SEQ ID NO: 282 and SEQ ID NO: 936; SEQ ID NO: 282 and SEQ ID NO: 937; SEQ ID NO: 282 and SEQ ID NO: 938; SEQ ID NO: 283 and SEQ ID NO: 924; SEQ ID NO: 283 and SEQ ID NO: 925; SEQ ID NO: 283 and SEQ ID NO: 926; SEQ ID NO: 283 and SEQ ID NO: 927; SEQ ID NO: 283 and SEQ ID NO: 928; SEQ ID NO: 283 and SEQ ID NO: 929; SEQ ID NO: 283 and SEQ ID NO: 930; SEQ ID NO: 283 and SEQ ID NO: 931; SEQ ID NO: 283 and SEQ ID NO: 932; SEQ ID NO: 283 and SEQ ID NO: 933; SEQ ID NO: 283 and SEQ ID NO: 934; SEQ ID NO: 283 and SEQ ID NO: 935; SEQ ID NO: 283 and SEQ ID NO: 936; SEQ ID NO: 283 and SEQ ID NO: 937; SEQ ID NO: 283 and SEQ ID NO: 938; SEQ ID NO: 284 and SEQ ID NO: 924; SEQ ID NO: 284 and SEQ ID NO: 925; SEQ ID NO: 284 and SEQ ID NO: 926; SEQ ID NO: 284 and SEQ ID NO: 927; SEQ ID NO: 284 and SEQ ID NO: 928; SEQ ID NO: 284 and SEQ ID NO: 929; SEQ ID NO: 284 and SEQ ID NO: 930; SEQ ID NO: 284 and SEQ ID NO: 931; SEQ ID NO: 284 and SEQ ID NO: 932; SEQ ID NO: 284 and SEQ ID NO: 933; SEQ ID NO: 284 and SEQ ID NO: 934; SEQ ID NO: 284 and SEQ ID NO: 935; SEQ ID NO: 284 and SEQ ID NO: 936; SEQ ID NO: 284 and SEQ ID NO: 937; SEQ ID NO: 284 and SEQ ID NO: 938; SEQ ID NO: 285 and SEQ ID NO: 924; SEQ ID NO: 285 and SEQ ID NO: 925; SEQ ID NO: 285 and SEQ ID NO: 926; SEQ ID NO: 285 and SEQ ID NO: 927; SEQ ID NO: 285 and SEQ ID NO: 928; SEQ ID NO: 285 and SEQ ID NO: 929; SEQ ID NO: 285 and SEQ ID NO: 930; SEQ ID NO: 285 and SEQ ID NO: 931; SEQ ID NO: 285 and SEQ ID NO: 932; SEQ ID NO: 285 and SEQ ID NO: 933; SEQ ID NO: 285 and SEQ ID NO: 934; SEQ ID NO: 285 and SEQ ID NO: 935; SEQ ID NO: 285 and SEQ ID NO: 936; SEQ ID NO: 285 and SEQ ID NO: 937; SEQ ID NO: 285 and SEQ ID NO: 938; SEQ ID NO: 286 and SEQ ID NO: 924; SEQ ID NO: 286 and SEQ ID NO: 925; SEQ ID NO: 286 and SEQ ID NO: 926; SEQ ID NO: 286 and SEQ ID NO: 927; SEQ ID NO: 286 and SEQ ID NO: 928; SEQ ID NO: 286 and SEQ ID NO: 929; SEQ ID NO: 286 and SEQ ID NO: 930; SEQ ID NO: 286 and SEQ ID NO: 931; SEQ ID NO: 286 and SEQ ID NO: 932; SEQ ID NO: 286 and SEQ ID NO: 933; SEQ ID NO: 286 and SEQ ID NO: 934; SEQ ID NO: 286 and SEQ ID NO: 935; SEQ ID NO: 286 and SEQ ID NO: 936; SEQ ID NO: 286 and SEQ ID NO: 937; SEQ ID NO: 286 and SEQ ID NO: 938; SEQ ID NO: 287 and SEQ ID NO: 924; SEQ ID NO: 287 and SEQ ID NO: 925; SEQ ID NO: 287 and SEQ ID NO: 926; SEQ ID NO: 287 and SEQ ID NO: 927; SEQ ID NO: 287 and SEQ ID NO: 928; SEQ ID NO: 287 and SEQ ID NO: 929; SEQ ID NO: 287 and SEQ ID NO: 930; SEQ ID NO: 287 and SEQ ID NO: 931; SEQ ID NO: 287 and SEQ ID NO: 932; SEQ ID NO: 287 and SEQ ID NO: 933; SEQ ID NO: 287 and SEQ ID NO: 934; SEQ ID NO: 287 and SEQ ID NO: 935; SEQ ID NO: 287 and SEQ ID NO: 936; SEQ ID NO: 287 and SEQ ID NO: 937; SEQ ID NO: 287 and SEQ ID NO: 938; SEQ ID NO: 288 and SEQ ID NO: 924; SEQ ID NO: 288 and SEQ ID NO: 925; SEQ ID NO: 288 and SEQ ID NO: 926; SEQ ID NO: 288 and SEQ ID NO: 927; SEQ ID NO: 288 and SEQ ID NO: 928; SEQ ID NO: 288 and SEQ ID NO: 929; SEQ ID NO: 288 and SEQ ID NO: 930; SEQ ID NO: 288 and SEQ ID NO: 931; SEQ ID NO: 288 and SEQ ID NO: 932; SEQ ID NO: 288 and SEQ ID NO: 933; SEQ ID NO: 288 and SEQ ID NO: 934; SEQ ID NO: 288 and SEQ ID NO: 935; SEQ ID NO: 288 and SEQ ID NO: 936; SEQ ID NO: 288 and SEQ ID NO: 937; SEQ ID NO: 288 and SEQ ID NO: 938; SEQ ID NO: 289 and SEQ ID NO: 924; SEQ ID NO: 289 and SEQ ID NO: 925; SEQ ID NO: 289 and SEQ ID NO: 926; SEQ ID NO: 289 and SEQ ID NO: 927; SEQ ID NO: 289 and SEQ ID NO: 928; SEQ ID NO: 289 and SEQ ID NO: 929; SEQ ID NO: 289 and SEQ ID NO: 930; SEQ ID NO: 289 and SEQ ID NO: 931; SEQ ID NO: 289 and SEQ ID NO: 932; SEQ ID NO: 289 and SEQ ID NO: 933; SEQ ID NO: 289 and SEQ ID NO: 934; SEQ ID NO: 289 and SEQ ID NO: 935; SEQ ID NO: 289 and SEQ ID NO: 936; SEQ ID NO: 289 and SEQ ID NO: 937; SEQ ID NO: 289 and SEQ ID NO: 938; SEQ ID NO: 290 and SEQ ID NO: 924; SEQ ID NO: 290 and SEQ ID NO: 925; SEQ ID NO: 290 and SEQ ID NO: 926; SEQ ID NO: 290 and SEQ ID NO: 927; SEQ ID NO: 290 and SEQ ID NO: 928; SEQ ID NO: 290 and SEQ ID NO: 929; SEQ ID NO: 290 and SEQ ID NO: 930; SEQ ID NO: 290 and SEQ ID NO: 931; SEQ ID NO: 290 and SEQ ID NO: 932; SEQ ID NO: 290 and SEQ ID NO: 933; SEQ ID NO: 290 and SEQ ID NO: 934; SEQ ID NO: 290 and SEQ ID NO: 935; SEQ ID NO: 290 and SEQ ID NO: 936; SEQ ID NO: 290 and SEQ ID NO: 937; SEQ ID NO: 290 and SEQ ID NO: 938; SEQ ID NO: 291 and SEQ ID NO: 924; SEQ ID NO: 291 and SEQ ID NO: 925; SEQ ID NO: 291 and SEQ ID NO: 926; SEQ ID NO: 291 and SEQ ID NO: 927; SEQ ID NO: 291 and SEQ ID NO: 928; SEQ ID NO: 291 and SEQ ID NO: 929; SEQ ID NO: 291 and SEQ ID NO: 930; SEQ ID NO: 291 and SEQ ID NO: 931; SEQ ID NO: 291 and SEQ ID NO: 932; SEQ ID NO: 291 and SEQ ID NO: 933; SEQ ID NO: 291 and SEQ ID NO: 934; SEQ ID NO: 291 and SEQ ID NO: 935; SEQ ID NO: 291 and SEQ ID NO: 936; SEQ ID NO: 291 and SEQ ID NO: 937; SEQ ID NO: 291 and SEQ ID NO: 938; SEQ ID NO: 292 and SEQ ID NO: 924; SEQ ID NO: 292 and SEQ ID NO: 925; SEQ ID NO: 292 and SEQ ID NO: 926; SEQ ID NO: 292 and SEQ ID NO: 927; SEQ ID NO: 292 and SEQ ID NO: 928; SEQ ID NO: 292 and SEQ ID NO: 929; SEQ ID NO: 292 and SEQ ID NO: 930; SEQ ID NO: 292 and SEQ ID NO: 931; SEQ ID NO: 292 and SEQ ID NO: 932; SEQ ID NO: 292 and SEQ ID NO: 933; SEQ ID NO: 292 and SEQ ID NO: 934; SEQ ID NO: 292 and SEQ ID NO: 935; SEQ ID NO: 292 and SEQ ID NO: 936; SEQ ID NO: 292 and SEQ ID NO: 937; SEQ ID NO: 292 and SEQ ID NO: 938; SEQ ID NO: 950 and SEQ ID NO: 275; SEQ ID NO: 951 and SEQ ID NO: 275; SEQ ID NO: 952 and SEQ ID NO: 275; SEQ ID NO: 953 and SEQ ID NO: 275; SEQ ID NO: 954 and SEQ ID NO: 275; or SEQ ID NO: 955 and SEQ ID NO: 275.
[0023] Embodiment 4 is a composition comprising:
   [0024] a. a single nucleic acid molecule comprising:
      [0025] i. a nucleic acid encoding Staphylococcus aureus Cas9 (SaCas9) or Staphylococcus lugdunensis (SluCas9) and at least one, at least two, or at least three guide RNAs; or
      [0026] ii. a nucleic acid encoding Staphylococcus aureus Cas9 (SaCas9) or Staphylococcus lugdunensis (SluCas9) and from one to n guide RNAs, wherein n is no more than the maximum number of guide RNAs that can be expressed from said nucleic acid; or
      [0027] iii. a nucleic acid encoding Staphylococcus aureus Cas9 (SaCas9) or Staphylococcus lugdunensis (SluCas9) and 1, 2, or 3 guide RNAs;
wherein each guide RNA is selected from Table 6, optionally wherein the composition comprises at least one pair of guide RNAs, wherein the at least one pair is selected from the pairs shown in Tables 1B, 1D, 3B, 3D, 5B, or 5D; or
   [0028] b. two nucleic acid molecules comprising:
      [0029] i. a first nucleic acid encoding Staphylococcus aureus Cas9 (SaCas9) or Staphylococcus lugdunensis (SluCas9); and
         [0030] 1. a second nucleic acid that does not encode a SaCas9 or SluCas9 and encodes any one of the following:
         [0031] 2. at least one, at least two, at least three, at least four, at least five, or at least six guide RNAs; or
         [0032] 3. from one to n guide RNAs, wherein n is no more than the maximum number of guide RNAs that can be expressed from said nucleic acid; or
         [0033] 4. from one to six guide RNAs; or
      [0034] ii. a first nucleic acid encoding Staphylococcus aureus Cas9 (SaCas9) or Staphylococcus lugdunensis (SluCas9) and
         [0035] 1. at least one, at least two, or at least three guide RNAs; or
         [0036] 2. from one to n guide RNAs, wherein n is no more than the maximum number of guide RNAs that can be expressed from said nucleic acid; or
         [0037] 3. 1, 2, or 3 guide RNAs; and
      a second nucleic acid that does not encode a SaCas9 or SluCas9, optionally wherein the second nucleic acid comprises any one of the following:
         [0038] 1. at least one, at least two, at least three, at least four, at least five, or at least six guide RNAs; or
         [0039] 2. from one to n guide RNAs, wherein n is no more than the maximum number of guide RNAs that can be expressed from said nucleic acid; or
         [0040] 3. from one to six guide RNAs; or
      [0041] iii. a first nucleic acid encoding Staphylococcus aureus Cas9 (SaCas9) or Staphylococcus lugdunensis (SluCas9) and at least one, at least two, or at least three guide RNAs; and a second nucleic acid that does not encode a SaCas9 or SluCas9 and encodes from one to six guide RNAs; or
      [0042] iv. a first nucleic acid encoding Staphylococcus aureus Cas9 (SaCas9) or Staphylococcus lugdunensis (SluCas9) and at least two guide RNAs, wherein a first guide RNA of the at least two guide RNAs binds upstream of a target sequence and a second guide RNA of the at least two guide RNAs binds downstream of the target sequence; and
      a second nucleic acid that does not encode a SaCas9 or SluCas9 and encodes at least one additional copy of each of the guide RNAs encoded in the first nucleic acid;
wherein each guide RNA is selected from Table 6, optionally wherein the composition comprises at least one pair of guide RNAs, wherein the at least one pair is selected from the pairs shown in Tables 1B, 1D, 3B, 3D, 5B, or 5D.
[0043] Embodiment 5 is a composition of any one of embodiments 1-4, comprising a pair of guide RNAs, wherein the pair of guide RNAs is capable of excising a DNA fragment from the DMD gene; wherein the DNA fragment is between 5-250 nucleotides in length.
[0044] Embodiment 6 is a composition of embodiment 5, wherein the excised DNA fragment does not comprise an entire exon of the DMD gene.
[0045] Embodiment 7 is a composition comprising a single nucleic acid molecule encoding a pair of guide RNAs and a Cas9, wherein the single nucleic acid molecule comprises:
   [0046] a. a first nucleic acid encoding the pair of guide RNAs, wherein the pair of guide RNAs comprises any one of the following pairs of guide sequences: SEQ ID NOs: 1 and 3; 16 and 17; 16 and 18; 16 and 19; 16 and 20; 16 and 21; 16 and 22; 16 and 23; 16 and 24; 16 and 25; 16 and 26; 17 and 18; 17 and 19; 17 and 20; 17 and 21; 17 and 22; 17 and 23; 17 and 24; 17 and 25; 17 and 26; 18 and 19; 18 and 20; 18 and 21; 18 and 22; 18 and 23; 18 and 24; 18 and 25; 18 and 26; 19 and 20; 19 and 21; 19 and 22; 19 and 23; 19 and 24; 19 and 25; 19 and 26; 20 and 21; 20 and 22; 20 and 23; 20 and 24; 20 and 25; 20 and 26; 21 and 22; 21 and 23; 21 and 24; 21 and 25; 21 and 26; 22 and 23; 22 and 24; 22 and 25; 22 and 26; 23 and 24; 23 and 25; 23 and 26; 24 and 25; 24 and 26; 25 and 26; 110 and 120; 110 and 121; 110 and 122; 110 and 123; 110 and 124; 110 and 125; 111 and 112; 111 and 113; 111 and 114; 111 and 115; 111 and 116; 111 and 117; 111 and 118; 111 and 119; 111 and 120; 111 and 121; 111 and 122; 111 and 123; 111 and 124; 111 and 125; 112 and 113; 112 and 114; 112 and 115; 112 and 116; 112 and 117; 112 and 118; 112 and 119; 112 and 120; 112 and 121; 112 and 122; 112 and 123; 112 and 124; 112 and 125; 113 and 114; 113 and 115; 113 and 116; 113 and 117; 113 and 118; 113 and 119; 113 and 120; 113 and 121; 113 and 122; 113 and 123; 113 and 124; 113 and 125; 114 and 115; 114 and 116; 114 and 117; 114 and 118; 114 and 119; 114 and 120; 114 and 121; 114 and 122; 114 and 123; 114 and 124; 114 and 125; 115 and 116; 115 and 117; 115 and 118; 115 and 119; 115 and 120; 115 and 121; 115 and 122; 115 and 123; 115 and 124; 115 and 125; 116 and 117; 116 and 118; 116 and 119; 116 and 120; 116 and 121; 116 and 122; 116 and 123; 116 and 124; 116 and 125; 117 and 118; 117 and 119; 117 and 120; 117 and 121; 117 and 122; 117 and 123; 117 and 124; 117 and 125; 118 and 119; 118 and 120; 118 and 121; 118 and 122; 118 and 123; 118 and 124; 118 and 125; 119 and 120; 119 and 121; 119 and 122; 119 and 123; 119 and 124; 119 and 125; 120 and 121; 120 and 122; 120 and 123; 120 and 124; 120 and 125; 121 and 122; 121 and 123; 121 and 124; 121 and 125; 122 and 123; 122 and 124; 122 and 125; 123 and 124; 123 and 125; 124 and 125; 148 and 149; 148 and 150; 148 and 151; 148 and 152; 148 and 153; 148 and 154; 148 and 155; 148 and 156; 148 and 157; 148 and 158; 148 and 159; 149 and 150; 149 and 151; 149 and 152; 149 and 153; 149 and 154; 149 and 155; 149 and 156; 149 and 157; 149 and 158; 149 and 159; 150 and 151; 150 and 152; 150 and 153; 150 and 154; 150 and 155; 150 and 156; 150 and 157; 150 and 158; 150 and 159; 151 and 152; 151 and 153; 151 and 154; 151 and 155; 151 and 156; 151 and 157; 151 and 158; 151 and 159; 152 and 153; 152 and 154; 152 and 155; 152 and 156; 152 and 157; 152 and 158; 152 and 159; 153 and 154; 153 and 155; 153 and 156; 153 and 157; 153 and 158; 153 and 159; 154 and 155; 154 and 156; 154 and 157; 154 and 158; 154 and 159; 155 and 156; 155 and 157; 155 and 158; 155 and 159; 156 and 157; 156 and 158; 156 and 159; 157 and 158; 157 and 159; 158 and 159; 71 and 72; 71 and 73; 71 and 74; 71 and 75; 71 and 76; 71 and 77; 71 and 78; 71 and 84; 71 and 85; 71 and 86; 71 and 87; 71 and 88; 71 and 89; 71 and 90; 71 and 91; 71 and 92; 71 and 93; 71 and 94; 71 and 95; 71 and 96; 71 and 97; 71 and 98; 71 and 99; 71 and 100; 71 and 101; 71 and 102; 72 and 73; 72 and 74; 72 and 75; 72 and 76; 72 and 77; 72 and 78; 72 and 84; 72 and 85; 72 and 86; 72 and 87; 72 and 88; 72 and 89; 72 and 90; 72 and 91; 72 and 92; 72 and 93; 72 and 94; 72 and 95; 72 and 96; 72 and 97; 72 and 98; 72 and 99; 72 and 100; 72 and 101; 72 and 102; 73 and 74; 73 and 75; 73 and 76; 73 and 77; 73 and 78; 73 and 84; 73 and 85; 73 and 86; 73 and 87; 73 and 88; 73 and 89; 73 and 90; 73 and 91; 73 and 92; 73 and 93; 73 and 94; 73 and 95; 73 and 96; 73 and 97; 73 and 98; 73 and 99; 73 and 100; 73 and 101; 73 and 102; 74 and 75; 74 and 76; 74 and 77; 74 and 78; 74 and 84; 74 and 85; 74 and 86; 74 and 87; 74 and 88; 74 and 89; 74 and 90; 74 and 91; 74 and 92; 74 and 93; 74 and 94; 74 and 95; 74 and 96; 74 and 97; 74 and 98; 74 and 99; 74 and 100; 74 and 101; 74 and 102; 75 and 76; 75 and 77; 75 and 78; 75 and 84; 75 and 85; 75 and 86; 75 and 87; 75 and 88; 75 and 89; 75 and 90; 75 and 91; 75 and 92; 75 and 93; 75 and 94; 75 and 95; 75 and 96; 75 and 97; 75 and 98; 75 and 99; 75 and 100; 75 and 101; 75 and 102; 76 and 77; 76 and 78; 76 and 84; 76 and 85; 76 and 86; 76 and 87; 76 and 88; 76 and 89; 76 and 90; 76 and 91; 76 and 92; 76 and 93; 76 and 94; 76 and 95; 76 and 96; 76 and 97; 76 and 98; 76 and 99; 76 and 100; 76 and 101; 76 and 102; 77 and 78; 77 and 84; 77 and 85; 77 and 86; 77 and 87; 77 and 88; 77 and 89; 77 and 90; 77 and 91; 77 and 92; 77 and 93; 77 and 94; 77 and 95; 77 and 96; 77 and 97; 77 and 98; 77 and 99; 77 and 100; 77 and 101; 77 and 102; 78 and 84; 78 and 85; 78 and 86; 78 and 87; 78 and 88; 78 and 89; 78 and 90; 78 and 91; 78 and 92; 78 and 93; 78 and 94; 78 and 95; 78 and 96; 78 and 97; 78 and 98; 78 and 99; 78 and 100; 78 and 101; 78 and 102; 84 and 85; 84 and 86; 84 and 87; 84 and 88; 84 and 89; 84 and 90; 84 and 91; 84 and 92; 84 and 93; 84 and 94; 84 and 95; 84 and 96; 84 and 97; 84 and 98; 84 and 99; 84 and 100; 84 and 101; 84 and 102; 85 and 86; 85 and 87; 85 and 88; 85 and 89; 85 and 90; 85 and 91; 85 and 92; 85 and 93; 85 and 94; 85 and 95; 85 and 96; 85 and 97; 85 and 98; 85 and 99; 85 and 100; 85 and 101; 85 and 102; 86 and 87; 86 and 88; 86 and 89; 86 and 90; 86 and 91; 86 and 92; 86 and 93; 86 and 94; 86 and 95; 86 and 96; 86 and 97; 86 and 98; 86 and 99; 86 and 100; 86 and 101; 86 and 102; 87 and 88; 87 and 89; 87 and 90; 87 and 91; 87 and 92; 87 and 93; 87 and 94; 87 and 95; 87 and 96; 87 and 97; 87 and 98; 87 and 99; 87 and 100; 87 and 101; 87 and 102; 88 and 89; 88 and 90; 88 and 91; 88 and 92; 88 and 93; 88 and 94; 88 and 95; 88 and 96; 88 and 97; 88 and 98; 88 and 99; 88 and 100; 88 and 101; 88 and 102; 89 and 90; 89 and 91; 89 and 92; 89 and 93; 89 and 94; 89 and 95; 89 and 96; 89 and 97; 89 and 98; 89 and 99; 89 and 100; 89 and 101; 89 and 102; 90 and 91; 90 and 92; 90 and 93; 90 and 94; 90 and 95; 90 and 96; 90 and 97; 90 and 98; 90 and 99; 90 and 100; 90 and 101; 90 and 102; 91 and 92; 91 and 93; 91 and 94; 91 and 95; 91 and 96; 91 and 97; 91 and 98; 91 and 99; 91 and 100; 91 and 101; 91 and 102; 92 and 93; 92 and 94; 92 and 95; 92 and 96; 92 and 97; 92 and 98; 92 and 99; 92 and 100; 92 and 101; 92 and 102; 93 and 94; 93 and 95; 93 and 96; 93 and 97; 93 and 98; 93 and 99; 93 and 100; 93 and 101; 93 and 102; 94 and 95; 94 and 96; 94 and 97; 94 and 98; 94 and 99; 94 and 100; 94 and 101; 94 and 102; 95 and 96; 95 and 97; 95 and 98; 95 and 99; 95 and 100; 95 and 101; 95 and 102; 96 and 97; 96 and 98; 96 and 99; 96 and 100; 96 and 101; 96 and 102; 97 and 98; 97 and 99; 97 and 100; 97 and 101; 97 and 102; 98 and 99; 98 and 100; 98 and 101; 98 and 102; 99 and 100; 99 and 101; 99 and 102; 100 and 101; 100 and 102; or 101 and 102; and a second nucleic acid encoding a Staphylococcus aureus Cas9 (SaCas9); or
   [0047] b. a first nucleic acid encoding a pair of guide RNAs, wherein the pair of guide RNAs comprises any one of the following pairs of guide sequences: SEQ ID NOs: 200 and 201; 200 and 202; 200 and 203; 200 and 204; 200 and 205; 200 and 206; 200 and 207; 200 and 208; 201 and 202; 201 and 203; 201 and 204; 201 and 205; 201 and 206; 201 and 207; 201 and 208; 202 and 203; 202 and 204; 202 and 205; 202 and 206; 202 and 207; 202 and 208; 203 and 204; 203 and 205; 203 and 206; 203 and 207; 203 and 208; 204 and 205; 204 and 206; 204 and 207; 204 and 208; 205 and 206; 205 and 207; 205 and 208; 206 and 207; 206 and 208; 207 and 208; 231 and 232; 231 and 233; 231 and 234; 231 and 235; 231 and 236; 231 and 237; 231 and 238; 231 and 239; 231 and 240; 231 and 241; 231 and 242; 232 and 233; 232 and 234; 232 and 235; 232 and 236; 232 and 237; 232 and 238; 232 and 239; 232 and 240; 232 and 241; 232 and 242; 233 and 234; 233 and 235; 233 and 236; 233 and 237; 233 and 238; 233 and 239; 233 and 240; 233 and 241; 233 and 242; 234 and 235; 234 and 236; 234 and 237; 234 and 238; 234 and 239; 234 and 240; 234 and 241; 234 and 242; 235 and 236; 235 and 237; 235 and 238; 235 and 239; 235 and 240; 235 and 241; 235 and 242; 236 and 237; 236 and 238; 236 and 239; 236 and 240; 236 and 241; 236 and 242; 237 and 238; 237 and 239; 237 and 240; 237 and 241; 237 and 242; 238 and 239; 238 and 240; 238 and 241; 238 and 242; 239 and 240; 239 and 241; 239 and 242; 240 and 241; 240 and 242; 241 and 242; 270 and 271; 270 and 272; 270 and 273; 270 and 274; 270 and 275; 270 and 276; 270 and 277; 270 and 278; 270 and 279; 270 and 280; 270 and 281; 270 and 282; 270 and 283; 270 and 284; 270 and 285; 270 and 286; 270 and 287; 270 and 288; 270 and 289; 270 and 290; 270 and 291; 270 and 292; 271 and 272; 271 and 273; 271 and 274; 271 and 275; 271 and 276; 271 and 277; 271 and 278; 271 and 279; 271 and 280; 271 and 281; 271 and 282; 271 and 283; 271 and 284; 271 and 285; 271 and 286; 271 and 287; 271 and 288; 271 and 289; 271 and 290; 271 and 291; 271 and 292; 272 and 273; 272 and 274; 272 and 275; 272 and 276; 272 and 277; 272 and 278; 272 and 279; 272 and 280; 272 and 281; 272 and 282; 272 and 283; 272 and 284; 272 and 285; 272 and 286; 272 and 287; 272 and 288; 272 and 289; 272 and 290; 272 and 291; 272 and 292; 273 and 274; 273 and 275; 273 and 276; 273 and 277; 273 and 278; 273 and 279; 273 and 280; 273 and 281; 273 and 282; 273 and 283; 273 and 284; 273 and 285; 273 and 286; 273 and 287; 273 and 288; 273 and 289; 273 and 290; 273 and 291; 273 and 292; 274 and 275; 274 and 276; 274 and 277; 274 and 278; 274 and 279; 274 and 280; 274 and 281; 274 and 282; 274 and 283; 274 and 284; 274 and 285; 274 and 286; 274 and 287; 274 and 288; 274 and 289; 274 and 290; 274 and 291; 274 and 292; 275 and 276; 275 and 277; 275 and 278; 275 and 279; 275 and 280; 275 and 281; 275 and 282; 275 and 283; 275 and 284; 275 and 285; 275 and 286; 275 and 287; 275 and 288; 275 and 289; 275 and 290; 275 and 291; 275 and 292; 276 and 277; 276 and 278; 276 and 279; 276 and 280; 276 and 281; 276 and 282; 276 and 283; 276 and 284; 276 and 285; 276 and 286; 276 and 287; 276 and 288; 276 and 289; 276 and 290; 276 and 291; 276 and 292; 277 and 278; 277 and 279; 277 and 280; 277 and 281; 277 and 282; 277 and 283; 277 and 284; 277 and 285; 277 and 286; 277 and 287; 277 and 288; 277 and 289; 277 and 290; 277 and 291; 277 and 292; 278 and 279; 278 and 280; 278 and 281; 278 and 282; 278 and 283; 278 and 284; 278 and 285; 278 and 286; 278 and 287; 278 and 288; 278 and 289; 278 and 290; 278 and 291; 278 and 292; 279 and 280; 279 and 281; 279 and 282; 279 and 283; 279 and 284; 279 and 285; 279 and 286; 279 and 287; 279 and 288; 279 and 289; 279 and 290; 279 and 291; 279 and 292; 280 and 281; 280 and 282; 280 and 283; 280 and 284; 280 and 285; 280 and 286; 280 and 287; 280 and 288; 280 and 289; 280 and 290; 280 and 291; 280 and 292; 281 and 282; 281 and 283; 281 and 284; 281 and 285; 281 and 286; 281 and 287; 281 and 288; 281 and 289; 281 and 290; 281 and 291; 281 and 292; 282 and 283; 282 and 284; 282 and 285; 282 and 286; 282 and 287; 282 and 288; 282 and 289; 282 and 290; 282 and 291; 282 and 292; 283 and 284; 283 and 285; 283 and 286; 283 and 287; 283 and 288; 283 and 289; 283 and 290; 283 and 291; 283 and 292; 284 and 285; 284 and 286; 284 and 287; 284 and 288; 284 and 289; 284 and 290; 284 and 291; 284 and 292; 285 and 286; 285 and 287; 285 and 288; 285 and 289; 285 and 290; 285 and 291; 285 and 292; 286 and 287; 286 and 288; 286 and 289; 286 and 290; 286 and 291; 286 and 292; 287 and 288; 287 and 289; 287 and 290; 287 and 291; 287 and 292; 288 and 289; 288 and 290; 288 and 291; 288 and 292; 289 and 290; 289 and 291; 289 and 292; 290 and 291; 290 and 292; 291 and 292; 924 and 270; 924 and 272; 924 and 273; 924 and 274; 924 and 275; 924 and 276; 924 and 277; 924 and 278; 924 and 279; 924 and 280; 924 and 281; 924 and 282; 924 and 283; 924 and 284; 924 and 285; 924 and 286; 924 and 287; 924 and 288; 924 and 289; 924 and 290; 924 and 291; 924 and 292; 925 and 270; 925 and 272; 925 and 273; 925 and 274; 925 and 275; 925 and 276; 925 and 277; 925 and 278; 925 and 279; 925 and 280; 925 and 281; 925 and 282; 925 and 283; 925 and 284; 925 and 285; 925 and 286; 925 and 287; 925 and 288; 925 and 289; 925 and 290; 925 and 291; 925 and 292; 926 and 270; 926 and 272; 926 and 273; 926 and 274; 926 and 275; 926 and 276; 926 and 277; 926 and 278; 926 and 279; 926 and 280; 926 and 281; 926 and 282; 926 and 283; 926 and 284; 926 and 285; 926 and 286; 926 and 287; 926 and 288; 926 and 289; 926 and 290; 926 and 291; 926 and 292; 927 and 270; 927 and 272; 927 and 273; 927 and 274; 927 and 275; 927 and 276; 927 and 277; 927 and 278; 927 and 279; 927 and 280; 927 and 281; 927 and 282; 927 and 283; 927 and 284; 927 and 285; 927 and 286; 927 and 287; 927 and 288; 927 and 289; 927 and 290; 927 and 291; 927 and 292; 928 and 270; 928 and 272; 928 and 273; 928 and 274; 928 and 275; 928 and 276; 928 and 277; 928 and 278; 928 and 279; 928 and 280; 928 and 281; 928 and 282; 928 and 283; 928 and 284; 928 and 285; 928 and 286; 928 and 287; 928 and 288; 928 and 289; 928 and 290; 928 and 291; 928 and 292; 929 and 270; 929 and 272; 929 and 273; 929 and 274; 929 and 275; 929 and 276; 929 and 277; 929 and 278; 929 and 279; 929 and 280; 929 and 281; 929 and 282; 929 and 283; 929 and 284; 929 and 285; 929 and 286; 929 and 287; 929 and 288; 929 and 289; 929 and 290; 929 and 291; 929 and 292; 930 and 270; 930 and 272; 930 and 273; 930 and 274; 930 and 275; 930 and 276; 930 and 277; 930 and 278; 930 and 279; 930 and 280; 930 and 281; 930 and 282; 930 and 283; 930 and 284; 930 and 285; 930 and 286; 930 and 287; 930 and 288; 930 and 289; 930 and 290; 930 and 291; 930 and 292; 931 and 270; 931 and 272; 931 and 273; 931 and 274; 931 and 275; 931 and 276; 931 and 277; 931 and 278; 931 and 279; 931 and 280; 931 and 281; 931 and 282; 931 and 283; 931 and 284; 931 and 285; 931 and 286; 931 and 287; 931 and 288; 931 and 289; 931 and 290; 931 and 291; 931 and 292; 932 and 270; 932 and 272; 932 and 273; 932 and 274; 932 and 275; 932 and 276; 932 and 277; 932 and 278; 932 and 279; 932 and 280; 932 and 281; 932 and 282; 932 and 283; 932 and 284; 932 and 285; 932 and 286; 932 and 287; 932 and 288; 932 and 289; 932 and 290; 932 and 291; 932 and 292; 933 and 270; 933 and 272; 933 and 273; 933 and 274; 933 and 275; 933 and 276; 933 and 277; 933 and 278; 933 and 279; 933 and 280; 933 and 281; 933 and 282; 933 and 283; 933 and 284; 933 and 285; 933 and 286; 933 and 287; 933 and 288; 933 and 289; 933 and 290; 933 and 291; 933 and 292; 934 and 270; 934 and 272; 934 and 273; 934 and 274; 934 and 275; 934 and 276; 934 and 277; 934 and 278; 934 and 279; 934 and 280; 934 and 281; 934 and 282; 934 and 283; 934 and 284; 934 and 285; 934 and 286; 934 and 287; 934 and 288; 934 and 289; 934 and 290; 934 and 291; 934 and 292; 935 and 270; 935 and 272; 935 and 273; 935 and 274; 935 and 275; 935 and 276; 935 and 277; 935 and 278; 935 and 279; 935 and 280; 935 and 281; 935 and 282; 935 and 283; 935 and 284; 935 and 285; 935 and 286; 935 and 287; 935 and 288; 935 and 289; 935 and 290; 935 and 291; 935 and 292; 936 and 270; 936 and 272; 936 and 273; 936 and 274; 936 and 275; 936 and 276; 936 and 277; 936 and 278; 936 and 279; 936 and 280; 936 and 281; 936 and 282; 936 and 283; 936 and 284; 936 and 285; 936 and 286; 936 and 287; 936 and 288; 936 and 289; 936 and 290; 936 and 291; 936 and 292; 937 and 270; 937 and 272; 937 and 273; 937 and 274; 937 and 275; 937 and 276; 937 and 277; 937 and 278; 937 and 279; 937 and 280; 937 and 281; 937 and 282; 937 and 283; 937 and 284; 937 and 285; 937 and 286; 937 and 287; 937 and 288; 937 and 289; 937 and 290; 937 and 291; 937 and 292; 938 and 270; 938 and 272; 938 and 273; 938 and 274; 938 and 275; 938 and 276; 938 and 277; 938 and 278; 938 and 279; 938 and 280; 938 and 281; 938 and 282; 938 and 283; 938 and 284; 938 and 285; 938 and 286; 938 and 287; 938 and 288; 938 and 289; 938 and 290; 938 and 291; 938 and 292; 950 and 275; 951 and 275; 952 and 275; 953 and 275; 954 and 275; or 955 and 275; and a second nucleic acid encoding a Staphylococcus lugdunensis (SluCas9); or
   [0048] c. a first nucleic acid encoding a pair of guide RNAs, wherein the pair of guide RNAs comprises any one of the following pairs of guide sequences targeting exon 44: SEQ ID NOs: 200 and 203; 200 and 204; 202 and 203; 202 and 205; 202 and 206; 202 and 207; 204 and 208; 204 and 205; 204 and 206; 204 and 207; or 204 and 208; and a second nucleic acid encoding a Staphylococcus lugdunensis (SluCas9); or
   [0049] d. a first nucleic acid encoding a pair of guide RNAs, wherein the pair of guide RNAs comprises any one of the following pairs of guide sequences targeting exon 50: SEQ ID NOs: 231 and 232; 231 and 234; 231 and 236; 231 and 237; 236 and 233; 236 and 235; 236 and 238; 236 and 240; or 236 and 241; and a second nucleic acid encoding a Staphylococcus lugdunensis (SluCas9); or
   [0050] e. a first nucleic acid encoding a pair of guide RNAs, wherein the pair of guide RNAs comprises any one of the following pairs of guide sequences targeting exon 53: SEQ ID NOs: 86 and 96; 87 and 96; 88 and 97; 89 and 96; 90 and 97; 92 and 77; 92 and 78; 92 and 96; 92 and 99; 93 and 98; 93 and 102; 94 and 100; 95 and 77; 95 and 78; 95 and 99; 96 and 100; 97 and 98; 97 and 102; 98 and 73; or 102 and 73; and a second nucleic acid encoding a Staphylococcus aureus Cas9 (SaCas9); or
   [0051] f. a first nucleic acid encoding a pair of guide RNAs, wherein the pair of guide RNAs comprises any one of the following pairs of guide sequences targeting exon 53: SEQ ID NOs: 278 and 290; 278 and 292; 281 and 291; 283 and 290; 283 and 292; 287 and 291; 272 and 290; 290 and 291; or 272 and 292; and a second nucleic acid encoding a Staphylococcus lugdunensis (SluCas9).
[0052] Embodiment 8 is a composition comprising one or more nucleic acid molecules encoding a Staphylococcus aureus Cas9 (SaCas9) and a first and a second guide RNA, wherein the first and the second guide RNAs target different sequences in a DMD gene, and wherein the first and the second guide RNAs each comprise a sequence that is at least 90% identical to a first and a second guide sequence selected from any one of the following pairs of first and second guide sequences:
[0053] any one of the following pairs of first and second guide sequences targeting exon 53, SEQ ID NOs: 86 and 96; 87 and 96; 88 and 97; 89 and 96; 90 and 97; 92 and 77; 92 and 78; 92 and 96; 92 and 99; 93 and 98; 93 and 102; 94 and 100; 95 and 77; 95 and 78; 95 and 99; 96 and 100; 97 and 98; 97 and 102; 98 and 73; or 102 and 73.
[0054] Embodiment 9 is a composition comprising one or more nucleic acid molecules encoding a Staphylococcus lugdunensis (SluCas9) and a first and a second guide RNA, wherein the first and the second guide RNAs target different sequences in a DMD gene, and wherein the first and the second guide RNAs each comprise a sequence that is at least 90% identical to a first and second guide sequence selected from any one of the following pairs of first and second guide sequences:
   [0055] a. any one of the following pairs of first and second guide sequences targeting exon 44, SEQ ID NOs: 200 and 203; 200 and 204; 202 and 203; 202 and 205; 202 and 206; 202 and 207; 204 and 208; 204 and 205; 204 and 206; 204 and 207; or 204 and 208;
   [0056] b. any one of the following pairs of first and second guide sequences targeting exon 50, SEQ ID NOs: 231 and 232; 231 and 234; 231 and 236; 231 and 237; 236 and 233; 236 and 235; 236 and 238; 236 and 240; or 236 and 241;
   [0057] c. any one of the following pairs of first and second guide sequences targeting exon 53, SEQ ID NOs: 278 and 290; 278 and 292; 281 and 291; 283 and 290; 283 and 292; 287 and 291; 272 and 290; 290 and 291; or 272 and 292.
[0058] Embodiment 10 is a composition comprising one or more nucleic acid molecules encoding an endonuclease and at least two guide RNAs, wherein the at least two guide RNAs each target a different sequence in a DMD gene, and wherein the at least two guide RNAs each comprise a sequence that is at least 90% identical to a first and second guide sequence selected from any one of the following pairs of first and second guide sequences:
   [0059] a. for exon 44, SEQ ID NOs: 1 and 3; 110 and 120; 110 and 121; 110 and 122; 110 and 123; 110 and 124; 110 and 125; 111 and 112; 111 and 113; 111 and 114; 111 and 115; 111 and 116; 111 and 117; 111 and 118; 111 and 119; 111 and 120; 111 and 121; 111 and 122; 111 and 123; 111 and 124; 111 and 125; 112 and 113; 112 and 114; 112 and 115; 112 and 116; 112 and 117; 112 and 118; 112 and 119; 112 and 120; 112 and 121; 112 and 122; 112 and 123; 112 and 124; 112 and 125; 113 and 114; 113 and 115; 113 and 116; 113 and 117; 113 and 118; 113 and 119; 113 and 120; 113 and 121; 113 and 122; 113 and 123; 113 and 124; 113 and 125; 114 and 115; 114 and 116; 114 and 117; 114 and 118; 114 and 119; 114 and 120; 114 and 121; 114 and 122; 114 and 123; 114 and 124; 114 and 125; 115 and 116; 115 and 117; 115 and 118; 115 and 119; 115 and 120; 115 and 121; 115 and 122; 115 and 123; 115 and 124; 115 and 125; 116 and 117; 116 and 118; 116 and 119; 116 and 120; 116 and 121; 116 and 122; 116 and 123; 116 and 124; 116 and 125; 117 and 118; 117 and 119; 117 and 120; 117 and 121; 117 and 122; 117 and 123; 117 and 124; 117 and 125; 118 and 119; 118 and 120; 118 and 121; 118 and 122; 118 and 123; 118 and 124; 118 and 125; 119 and 120; 119 and 121; 119 and 122; 119 and 123; 119 and 124; 119 and 125; 120 and 121; 120 and 122; 120 and 123; 120 and 124; 120 and 125; 121 and 122; 121 and 123; 121 and 124; 121 and 125; 122 and 123; 122 and 124; 122 and 125; 123 and 124; 123 and 125; or 124 and 125;
   [0060] b. for exon 50, SEQ ID NOs: 148 and 149; 148 and 150; 148 and 151; 148 and 152; 148 and 153; 148 and 154; 148 and 155; 148 and 156; 148 and 157; 148 and 158; 148 and 159; 149 and 150; 149 and 151; 149 and 152; 149 and 153; 149 and 154; 149 and 155; 149 and 156; 149 and 157; 149 and 158; 149 and 159; 150 and 151; 150 and 152; 150 and 153; 150 and 154; 150 and 155; 150 and 156; 150 and 157; 150 and 158; 150 and 159; 151 and 152; 151 and 153; 151 and 154; 151 and 155; 151 and 156; 151 and 157; 151 and 158; 151 and 159; 152 and 153; 152 and 154; 152 and 155; 152 and 156; 152 and 157; 152 and 158; 152 and 159; 153 and 154; 153 and 155; 153 and 156; 153 and 157; 153 and 158; 153 and 159; 154 and 155; 154 and 156; 154 and 157; 154 and 158; 154 and 159; 155 and 156; 155 and 157; 155 and 158; 155 and 159; 156 and 157; 156 and 158; 156 and 159; 157 and 158; 157 and 159; or 158 and 159;
   [0061] c. for exon 53, SEQ ID NOs: 16 and 17; 16 and 18; 16 and 19; 16 and 20; 16 and 21; 16 and 22; 16 and 23; 16 and 24; 16 and 25; 16 and 26; 17 and 18; 17 and 19; 17 and 20; 17 and 21; 17 and 22; 17 and 23; 17 and 24; 17 and 25; 17 and 26; 18 and 19; 18 and 20; 18 and 21; 18 and 22; 18 and 23; 18 and 24; 18 and 25; 18 and 26; 19 and 20; 19 and 21; 19 and 22; 19 and 23; 19 and 24; 19 and 25; 19 and 26; 20 and 21; 20 and 22; 20 and 23; 20 and 24; 20 and 25; 20 and 26; 21 and 22; 21 and 23; 21 and 24; 21 and 25; 21 and 26; 22 and 23; 22 and 24; 22 and 25; 22 and 26; 23 and 24; 23 and 25; 23 and 26; 24 and 25; 24 and 26; 25 and 26; 71 and 72; 71 and 73; 71 and 74; 71 and 75; 71 and 76; 71 and 77; 71 and 78; 71 and 84; 71 and 85; 71 and 86; 71 and 87; 71 and 88; 71 and 89; 71 and 90; 71 and 91; 71 and 92; 71 and 93; 71 and 94; 71 and 95; 71 and 96; 71 and 97; 71 and 98; 71 and 99; 71 and 100; 71 and 101; 71 and 102; 72 and 73; 72 and 74; 72 and 75; 72 and 76; 72 and 77; 72 and 78; 72 and 84; 72 and 85; 72 and 86; 72 and 87; 72 and 88; 72 and 89; 72 and 90; 72 and 91; 72 and 92; 72 and 93; 72 and 94; 72 and 95; 72 and 96; 72 and 97; 72 and 98; 72 and 99; 72 and 100; 72 and 101; 72 and 102; 73 and 74; 73 and 75; 73 and 76; 73 and 77; 73 and 78; 73 and 84; 73 and 85; 73 and 86; 73 and 87; 73 and 88; 73 and 89; 73 and 90; 73 and 91; 73 and 92; 73 and 93; 73 and 94; 73 and 95; 73 and 96; 73 and 97; 73 and 98; 73 and 99; 73 and 100; 73 and 101; 73 and 102; 74 and 75; 74 and 76; 74 and 77; 74 and 78; 74 and 84; 74 and 85; 74 and 86; 74 and 87; 74 and 88; 74 and 89; 74 and 90; 74 and 91; 74 and 92; 74 and 93; 74 and 94; 74 and 95; 74 and 96; 74 and 97; 74 and 98; 74 and 99; 74 and 100; 74 and 101; 74 and 102; 75 and 76; 75 and 77; 75 and 78; 75 and 84; 75 and 85; 75 and 86; 75 and 87; 75 and 88; 75 and 89; 75 and 90; 75 and 91; 75 and 92; 75 and 93; 75 and 94; 75 and 95; 75 and 96; 75 and 97; 75 and 98; 75 and 99; 75 and 100; 75 and 101; 75 and 102; 76 and 77; 76 and 78; 76 and 84; 76 and 85; 76 and 86; 76 and 87; 76 and 88; 76 and 89; 76 and 90; 76 and 91; 76 and 92; 76 and 93; 76 and 94; 76 and 95; 76 and 96; 76 and 97; 76 and 98; 76 and 99; 76 and 100; 76 and 101; 76 and 102; 77 and 78; 77 and 84; 77 and 85; 77 and 86; 77 and 87; 77 and 88; 77 and 89; 77 and 90; 77 and 91; 77 and 92; 77 and 93; 77 and 94; 77 and 95; 77 and 96; 77 and 97; 77 and 98; 77 and 99; 77 and 100; 77 and 101; 77 and 102; 78 and 84; 78 and 85; 78 and 86; 78 and 87; 78 and 88; 78 and 89; 78 and 90; 78 and 91; 78 and 92; 78 and 93; 78 and 94; 78 and 95; 78 and 96; 78 and 97; 78 and 98; 78 and 99; 78 and 100; 78 and 101; 78 and 102; 84 and 85; 84 and 86; 84 and 87; 84 and 88; 84 and 89; 84 and 90; 84 and 91; 84 and 92; 84 and 93; 84 and 94; 84 and 95; 84 and 96; 84 and 97; 84 and 98; 84 and 99; 84 and 100; 84 and 101; 84 and 102; 85 and 86; 85 and 87; 85 and 88; 85 and 89; 85 and 90; 85 and 91; 85 and 92; 85 and 93; 85 and 94; 85 and 95; 85 and 96; 85 and 97; 85 and 98; 85 and 99; 85 and 100; 85 and 101; 85 and 102; 86 and 87; 86 and 88; 86 and 89; 86 and 90; 86 and 91; 86 and 92; 86 and 93; 86 and 94; 86 and 95; 86 and 96; 86 and 97; 86 and 98; 86 and 99; 86 and 100; 86 and 101; 86 and 102; 87 and 88; 87 and 89; 87 and 90; 87 and 91; 87 and 92; 87 and 93; 87 and 94; 87 and 95; 87 and 96; 87 and 97; 87 and 98; 87 and 99; 87 and 100; 87 and 101; 87 and 102; 88 and 89; 88 and 90; 88 and 91; 88 and 92; 88 and 93; 88 and 94; 88 and 95; 88 and 96; 88 and 97; 88 and 98; 88 and 99; 88 and 100; 88 and 101; 88 and 102; 89 and 90; 89 and 91; 89 and 92; 89 and 93; 89 and 94; 89 and 95; 89 and 96; 89 and 97; 89 and 98; 89 and 99; 89 and 100; 89 and 101; 89 and 102; 90 and 91; 90 and 92; 90 and 93; 90 and 94; 90 and 95; 90 and 96; 90 and 97; 90 and 98; 90 and 99; 90 and 100; 90 and 101; 90 and 102; 91 and 92; 91 and 93; 91 and 94; 91 and 95; 91 and 96; 91 and 97; 91 and 98; 91 and 99; 91 and 100; 91 and 101; 91 and 102; 92 and 93; 92 and 94; 92 and 95; 92 and 96; 92 and 97; 92 and 98; 92 and 99; 92 and 100; 92 and 101; 92 and 102; 93 and 94; 93 and 95; 93 and 96; 93 and 97; 93 and 98; 93 and 99; 93 and 100; 93 and 101; 93 and 102; 94 and 95; 94 and 96; 94 and 97; 94 and 98; 94 and 99; 94 and 100; 94 and 101; 94 and 102; 95 and 96; 95 and 97; 95 and 98; 95 and 99; 95 and 100; 95 and 101; 95 and 102; 96 and 97; 96 and 98; 96 and 99; 96 and 100; 96 and 101; 96 and 102; 97 and 98; 97 and 99; 97 and 100; 97 and 101; 97 and 102; 98 and 99; 98 and 100; 98 and 101; 98 and 102; 99 and 100; 99 and 101; 99 and 102; 100 and 101; 100 and 102; or 101 and 102; and a second nucleic acid encoding a SaCas9.
[0062] Embodiment 11 is a composition comprising a first and a second nucleic acid molecule, wherein the first nucleic acid molecule encodes a Staphylococcus aureus Cas9 (SaCas9) endonuclease and optionally a first or a first and second guide RNA, and the second nucleic acid molecule comprises a first or a first and second guide RNA, wherein the first guide RNA comprises a first sequence and the second guide RNA comprises a second sequence from any one the following pairs of first and second sequences: SEQ ID NOs: 1 and 3; 16 and 17; 16 and 18; 16 and 19; 16 and 20; 16 and 21; 16 and 22; 16 and 23; 16 and 24; 16 and 25; 16 and 26; 17 and 18; 17 and 19; 17 and 20; 17 and 21; 17 and 22; 17 and 23; 17 and 24; 17 and 25; 17 and 26; 18 and 19; 18 and 20; 18 and 21; 18 and 22; 18 and 23; 18 and 24; 18 and 25; 18 and 26; 19 and 20; 19 and 21; 19 and 22; 19 and 23; 19 and 24; 19 and 25; 19 and 26; 20 and 21; 20 and 22; 20 and 23; 20 and 24; 20 and 25; 20 and 26; 21 and 22; 21 and 23; 21 and 24; 21 and 25; 21 and 26; 22 and 23; 22 and 24; 22 and 25; 22 and 26; 23 and 24; 23 and 25; 23 and 26; 24 and 25; 24 and 26; 25 and 26; 110 and 120; 110 and 121; 110 and 122; 110 and 123; 110 and 124; 110 and 125; 111 and 112; 111 and 113; 111 and 114; 111 and 115; 111 and 116; 111 and 117; 111 and 118; 111 and 119; 111 and 120; 111 and 121; 111 and 122; 111 and 123; 111 and 124; 111 and 125; 112 and 113; 112 and 114; 112 and 115; 112 and 116; 112 and 117; 112 and 118; 112 and 119; 112 and 120; 112 and 121; 112 and 122; 112 and 123; 112 and 124; 112 and 125; 113 and 114; 113 and 115; 113 and 116; 113 and 117; 113 and 118; 113 and 119; 113 and 120; 113 and 121; 113 and 122; 113 and 123; 113 and 124; 113 and 125; 114 and 115; 114 and 116; 114 and 117; 114 and 118; 114 and 119; 114 and 120; 114 and 121; 114 and 122; 114 and 123; 114 and 124; 114 and 125; 115 and 116; 115 and 117; 115 and 118; 115 and 119; 115 and 120; 115 and 121; 115 and 122; 115 and 123; 115 and 124; 115 and 125; 116 and 117; 116 and 118; 116 and 119; 116 and 120; 116 and 121; 116 and 122; 116 and 123; 116 and 124; 116 and 125; 117 and 118; 117 and 119; 117 and 120; 117 and 121; 117 and 122; 117 and 123; 117 and 124; 117 and 125; 118 and 119; 118 and 120; 118 and 121; 118 and 122; 118 and 123; 118 and 124; 118 and 125; 119 and 120; 119 and 121; 119 and 122; 119 and 123; 119 and 124; 119 and 125; 120 and 121; 120 and 122; 120 and 123; 120 and 124; 120 and 125; 121 and 122; 121 and 123; 121 and 124; 121 and 125; 122 and 123; 122 and 124; 122 and 125; 123 and 124; 123 and 125; 124 and 125; 148 and 149; 148 and 150; 148 and 151; 148 and 152; 148 and 153; 148 and 154; 148 and 155; 148 and 156; 148 and 157; 148 and 158; 148 and 159; 149 and 150; 149 and 151; 149 and 152; 149 and 153; 149 and 154; 149 and 155; 149 and 156; 149 and 157; 149 and 158; 149 and 159; 150 and 151; 150 and 152; 150 and 153; 150 and 154; 150 and 155; 150 and 156; 150 and 157; 150 and 158; 150 and 159; 151 and 152; 151 and 153; 151 and 154; 151 and 155; 151 and 156; 151 and 157; 151 and 158; 151 and 159; 152 and 153; 152 and 154; 152 and 155; 152 and 156; 152 and 157; 152 and 158; 152 and 159; 153 and 154; 153 and 155; 153 and 156; 153 and 157; 153 and 158; 153 and 159; 154 and 155; 154 and 156; 154 and 157; 154 and 158; 154 and 159; 155 and 156; 155 and 157; 155 and 158; 155 and 159; 156 and 157; 156 and 158; 156 and 159; 157 and 158; 157 and 159; 158 and 159; 71 and 72; 71 and 73; 71 and 74; 71 and 75; 71 and 76; 71 and 77; 71 and 78; 71 and 84; 71 and 85; 71 and 86; 71 and 87; 71 and 88; 71 and 89; 71 and 90; 71 and 91; 71 and 92; 71 and 93; 71 and 94; 71 and 95; 71 and 96; 71 and 97; 71 and 98; 71 and 99; 71 and 100; 71 and 101; 71 and 102; 72 and 73; 72 and 74; 72 and 75; 72 and 76; 72 and 77; 72 and 78; 72 and 84; 72 and 85; 72 and 86; 72 and 87; 72 and 88; 72 and 89; 72 and 90; 72 and 91; 72 and 92; 72 and 93; 72 and 94; 72 and 95; 72 and 96; 72 and 97; 72 and 98; 72 and 99; 72 and 100; 72 and 101; 72 and 102; 73 and 74; 73 and 75; 73 and 76; 73 and 77; 73 and 78; 73 and 84; 73 and 85; 73 and 86; 73 and 87; 73 and 88; 73 and 89; 73 and 90; 73 and 91; 73 and 92; 73 and 93; 73 and 94; 73 and 95; 73 and 96; 73 and 97; 73 and 98; 73 and 99; 73 and 100; 73 and 101; 73 and 102; 74 and 75; 74 and 76; 74 and 77; 74 and 78; 74 and 84; 74 and 85; 74 and 86; 74 and 87; 74 and 88; 74 and 89; 74 and 90; 74 and 91; 74 and 92; 74 and 93; 74 and 94; 74 and 95; 74 and 96; 74 and 97; 74 and 98; 74 and 99; 74 and 100; 74 and 101; 74 and 102; 75 and 76; 75 and 77; 75 and 78; 75 and 84; 75 and 85; 75 and 86; 75 and 87; 75 and 88; 75 and 89; 75 and 90; 75 and 91; 75 and 92; 75 and 93; 75 and 94; 75 and 95; 75 and 96; 75 and 97; 75 and 98; 75 and 99; 75 and 100; 75 and 101; 75 and 102; 76 and 77; 76 and 78; 76 and 84; 76 and 85; 76 and 86; 76 and 87; 76 and 88; 76 and 89; 76 and 90; 76 and 91; 76 and 92; 76 and 93; 76 and 94; 76 and 95; 76 and 96; 76 and 97; 76 and 98; 76 and 99; 76 and 100; 76 and 101; 76 and 102; 77 and 78; 77 and 84; 77 and 85; 77 and 86; 77 and 87; 77 and 88; 77 and 89; 77 and 90; 77 and 91; 77 and 92; 77 and 93; 77 and 94; 77 and 95; 77 and 96; 77 and 97; 77 and 98; 77 and 99; 77 and 100; 77 and 101; 77 and 102; 78 and 84; 78 and 85; 78 and 86; 78 and 87; 78 and 88; 78 and 89; 78 and 90; 78 and 91; 78 and 92; 78 and 93; 78 and 94; 78 and 95; 78 and 96; 78 and 97; 78 and 98; 78 and 99; 78 and 100; 78 and 101; 78 and 102; 84 and 85; 84 and 86; 84 and 87; 84 and 88; 84 and 89; 84 and 90; 84 and 91; 84 and 92; 84 and 93; 84 and 94; 84 and 95; 84 and 96; 84 and 97; 84 and 98; 84 and 99; 84 and 100; 84 and 101; 84 and 102; 85 and 86; 85 and 87; 85 and 88; 85 and 89; 85 and 90; 85 and 91; 85 and 92; 85 and 93; 85 and 94; 85 and 95; 85 and 96; 85 and 97; 85 and 98; 85 and 99; 85 and 100; 85 and 101; 85 and 102; 86 and 87; 86 and 88; 86 and 89; 86 and 90; 86 and 91; 86 and 92; 86 and 93; 86 and 94; 86 and 95; 86 and 96; 86 and 97; 86 and 98; 86 and 99; 86 and 100; 86 and 101; 86 and 102; 87 and 88; 87 and 89; 87 and 90; 87 and 91; 87 and 92; 87 and 93; 87 and 94; 87 and 95; 87 and 96; 87 and 97; 87 and 98; 87 and 99; 87 and 100; 87 and 101; 87 and 102; 88 and 89; 88 and 90; 88 and 91; 88 and 92; 88 and 93; 88 and 94; 88 and 95; 88 and 96; 88 and 97; 88 and 98; 88 and 99; 88 and 100; 88 and 101; 88 and 102; 89 and 90; 89 and 91; 89 and 92; 89 and 93; 89 and 94; 89 and 95; 89 and 96; 89 and 97; 89 and 98; 89 and 99; 89 and 100; 89 and 101; 89 and 102; 90 and 91; 90 and 92; 90 and 93; 90 and 94; 90 and 95; 90 and 96; 90 and 97; 90 and 98; 90 and 99; 90 and 100; 90 and 101; 90 and 102; 91 and 92; 91 and 93; 91 and 94; 91 and 95; 91 and 96; 91 and 97; 91 and 98; 91 and 99; 91 and 100; 91 and 101; 91 and 102; 92 and 93; 92 and 94; 92 and 95; 92 and 96; 92 and 97; 92 and 98; 92 and 99; 92 and 100; 92 and 101; 92 and 102; 93 and 94; 93 and 95; 93 and 96; 93 and 97; 93 and 98; 93 and 99; 93 and 100; 93 and 101; 93 and 102; 94 and 95; 94 and 96; 94 and 97; 94 and 98; 94 and 99; 94 and 100; 94 and 101; 94 and 102; 95 and 96; 95 and 97; 95 and 98; 95 and 99; 95 and 100; 95 and 101; 95 and 102; 96 and 97; 96 and 98; 96 and 99; 96 and 100; 96 and 101; 96 and 102; 97 and 98; 97 and 99; 97 and 100; 97 and 101; 97 and 102; 98 and 99; 98 and 100; 98 and 101; 98 and 102; 99 and 100; 99 and 101; 99 and 102; 100 and 101; 100 and 102; or 101 and 102.
[0063] Embodiment 12 is a composition comprising a first and a second nucleic acid molecule, wherein the first nucleic acid molecule encodes a Staphylococcus lugdunensis (SluCas9) endonuclease and optionally a first or a first and second guide RNA, and the second nucleic acid molecule comprises a first or a first and second guide RNA, wherein the first guide RNA comprises a first sequence and the second guide RNAs comprises a second sequence from any one the following pairs of first and second sequences: SEQ ID NOs: 200 and 201; 200 and 202; 200 and 203; 200 and 204; 200 and 205; 200 and 206; 200 and 207; 200 and 208; 201 and 202; 201 and 203; 201 and 204; 201 and 205; 201 and 206; 201 and 207; 201 and 208; 202 and 203; 202 and 204; 202 and 205; 202 and 206; 202 and 207; 202 and 208; 203 and 204; 203 and 205; 203 and 206; 203 and 207; 203 and 208; 204 and 205; 204 and 206; 204 and 207; 204 and 208; 205 and 206; 205 and 207; 205 and 208; 206 and 207; 206 and 208; 207 and 208; 231 and 232; 231 and 233; 231 and 234; 231 and 235; 231 and 236; 231 and 237; 231 and 238; 231 and 239; 231 and 240; 231 and 241; 231 and 242; 232 and 233; 232 and 234; 232 and 235; 232 and 236; 232 and 237; 232 and 238; 232 and 239; 232 and 240; 232 and 241; 232 and 242; 233 and 234; 233 and 235; 233 and 236; 233 and 237; 233 and 238; 233 and 239; 233 and 240; 233 and 241; 233 and 242; 234 and 235; 234 and 236; 234 and 237; 234 and 238; 234 and 239; 234 and 240; 234 and 241; 234 and 242; 235 and 236; 235 and 237; 235 and 238; 235 and 239; 235 and 240; 235 and 241; 235 and 242; 236 and 237; 236 and 238; 236 and 239; 236 and 240; 236 and 241; 236 and 242; 237 and 238; 237 and 239; 237 and 240; 237 and 241; 237 and 242; 238 and 239; 238 and 240; 238 and 241; 238 and 242; 239 and 240; 239 and 241; 239 and 242; 240 and 241; 240 and 242; 241 and 242; 270 and 271; 270 and 272; 270 and 273; 270 and 274; 270 and 275; 270 and 276; 270 and 277; 270 and 278; 270 and 279; 270 and 280; 270 and 281; 270 and 282; 270 and 283; 270 and 284; 270 and 285; 270 and 286; 270 and 287; 270 and 288; 270 and 289; 270 and 290; 270 and 291; 270 and 292; 271 and 272; 271 and 273; 271 and 274; 271 and 275; 271 and 276; 271 and 277; 271 and 278; 271 and 279; 271 and 280; 271 and 281; 271 and 282; 271 and 283; 271 and 284; 271 and 285; 271 and 286; 271 and 287; 271 and 288; 271 and 289; 271 and 290; 271 and 291; 271 and 292; 272 and 273; 272 and 274; 272 and 275; 272 and 276; 272 and 277; 272 and 278; 272 and 279; 272 and 280; 272 and 281; 272 and 282; 272 and 283; 272 and 284; 272 and 285; 272 and 286; 272 and 287; 272 and 288; 272 and 289; 272 and 290; 272 and 291; 272 and 292; 273 and 274; 273 and 275; 273 and 276; 273 and 277; 273 and 278; 273 and 279; 273 and 280; 273 and 281; 273 and 282; 273 and 283; 273 and 284; 273 and 285; 273 and 286; 273 and 287; 273 and 288; 273 and 289; 273 and 290; 273 and 291; 273 and 292; 274 and 275; 274 and 276; 274 and 277; 274 and 278; 274 and 279; 274 and 280; 274 and 281; 274 and 282; 274 and 283; 274 and 284; 274 and 285; 274 and 286; 274 and 287; 274 and 288; 274 and 289; 274 and 290; 274 and 291; 274 and 292; 275 and 276; 275 and 277; 275 and 278; 275 and 279; 275 and 280; 275 and 281; 275 and 282; 275 and 283; 275 and 284; 275 and 285; 275 and 286; 275 and 287; 275 and 288; 275 and 289; 275 and 290; 275 and 291; 275 and 292; 276 and 277; 276 and 278; 276 and 279; 276 and 280; 276 and 281; 276 and 282; 276 and 283; 276 and 284; 276 and 285; 276 and 286; 276 and 287; 276 and 288; 276 and 289; 276 and 290; 276 and 291; 276 and 292; 277 and 278; 277 and 279; 277 and 280; 277 and 281; 277 and 282; 277 and 283; 277 and 284; 277 and 285; 277 and 286; 277 and 287; 277 and 288; 277 and 289; 277 and 290; 277 and 291; 277 and 292; 278 and 279; 278 and 280; 278 and 281; 278 and 282; 278 and 283; 278 and 284; 278 and 285; 278 and 286; 278 and 287; 278 and 288; 278 and 289; 278 and 290; 278 and 291; 278 and 292; 279 and 280; 279 and 281; 279 and 282; 279 and 283; 279 and 284; 279 and 285; 279 and 286; 279 and 287; 279 and 288; 279 and 289; 279 and 290; 279 and 291; 279 and 292; 280 and 281; 280 and 282; 280 and 283; 280 and 284; 280 and 285; 280 and 286; 280 and 287; 280 and 288; 280 and 289; 280 and 290; 280 and 291; 280 and 292; 281 and 282; 281 and 283; 281 and 284; 281 and 285; 281 and 286; 281 and 287; 281 and 288; 281 and 289; 281 and 290; 281 and 291; 281 and 292; 282 and 283; 282 and 284; 282 and 285; 282 and 286; 282 and 287; 282 and 288; 282 and 289; 282 and 290; 282 and 291; 282 and 292; 283 and 284; 283 and 285; 283 and 286; 283 and 287; 283 and 288; 283 and 289; 283 and 290; 283 and 291; 283 and 292; 284 and 285; 284 and 286; 284 and 287; 284 and 288; 284 and 289; 284 and 290; 284 and 291; 284 and 292; 285 and 286; 285 and 287; 285 and 288; 285 and 289; 285 and 290; 285 and 291; 285 and 292; 286 and 287; 286 and 288; 286 and 289; 286 and 290; 286 and 291; 286 and 292; 287 and 288; 287 and 289; 287 and 290; 287 and 291; 287 and 292; 288 and 289; 288 and 290; 288 and 291; 288 and 292; 289 and 290; 289 and 291; 289 and 292; 290 and 291; 290 and 292; 291 and 292; 924 and 270; 924 and 272; 924 and 273; 924 and 274; 924 and 275; 924 and 276; 924 and 277; 924 and 278; 924 and 279; 924 and 280; 924 and 281; 924 and 282; 924 and 283; 924 and 284; 924 and 285; 924 and 286; 924 and 287; 924 and 288; 924 and 289; 924 and 290; 924 and 291; 924 and 292; 925 and 270; 925 and 272; 925 and 273; 925 and 274; 925 and 275; 925 and 276; 925 and 277; 925 and 278; 925 and 279; 925 and 280; 925 and 281; 925 and 282; 925 and 283; 925 and 284; 925 and 285; 925 and 286; 925 and 287; 925 and 288; 925 and 289; 925 and 290; 925 and 291; 925 and 292; 926 and 270; 926 and 272; 926 and 273; 926 and 274; 926 and 275; 926 and 276; 926 and 277; 926 and 278; 926 and 279; 926 and 280; 926 and 281; 926 and 282; 926 and 283; 926 and 284; 926 and 285; 926 and 286; 926 and 287; 926 and 288; 926 and 289; 926 and 290; 926 and 291; 926 and 292; 927 and 270; 927 and 272; 927 and 273; 927 and 274; 927 and 275; 927 and 276; 927 and 277; 927 and 278; 927 and 279; 927 and 280; 927 and 281; 927 and 282; 927 and 283; 927 and 284; 927 and 285; 927 and 286; 927 and 287; 927 and 288; 927 and 289; 927 and 290; 927 and 291; 927 and 292; 928 and 270; 928 and 272; 928 and 273; 928 and 274; 928 and 275; 928 and 276; 928 and 277; 928 and 278; 928 and 279; 928 and 280; 928 and 281; 928 and 282; 928 and 283; 928 and 284; 928 and 285; 928 and 286; 928 and 287; 928 and 288; 928 and 289; 928 and 290; 928 and 291; 928 and 292; 929 and 270; 929 and 272; 929 and 273; 929 and 274; 929 and 275; 929 and 276; 929 and 277; 929 and 278; 929 and 279; 929 and 280; 929 and 281; 929 and 282; 929 and 283; 929 and 284; 929 and 285; 929 and 286; 929 and 287; 929 and 288; 929 and 289; 929 and 290; 929 and 291; 929 and 292; 930 and 270; 930 and 272; 930 and 273; 930 and 274; 930 and 275; 930 and 276; 930 and 277; 930 and 278; 930 and 279; 930 and 280; 930 and 281; 930 and 282; 930 and 283; 930 and 284; 930 and 285; 930 and 286; 930 and 287; 930 and 288; 930 and 289; 930 and 290; 930 and 291; 930 and 292; 931 and 270; 931 and 272; 931 and 273; 931 and 274; 931 and 275; 931 and 276; 931 and 277; 931 and 278; 931 and 279; 931 and 280; 931 and 281; 931 and 282; 931 and 283; 931 and 284; 931 and 285; 931 and 286; 931 and 287; 931 and 288; 931 and 289; 931 and 290; 931 and 291; 931 and 292; 932 and 270; 932 and 272; 932 and 273; 932 and 274; 932 and 275; 932 and 276; 932 and 277; 932 and 278; 932 and 279; 932 and 280; 932 and 281; 932 and 282; 932 and 283; 932 and 284; 932 and 285; 932 and 286; 932 and 287; 932 and 288; 932 and 289; 932 and 290; 932 and 291; 932 and 292; 933 and 270; 933 and 272; 933 and 273; 933 and 274; 933 and 275; 933 and 276; 933 and 277; 933 and 278; 933 and 279; 933 and 280; 933 and 281; 933 and 282; 933 and 283; 933 and 284; 933 and 285; 933 and 286; 933 and 287; 933 and 288; 933 and 289; 933 and 290; 933 and 291; 933 and 292; 934 and 270; 934 and 272; 934 and 273; 934 and 274; 934 and 275; 934 and 276; 934 and 277; 934 and 278; 934 and 279; 934 and 280; 934 and 281; 934 and 282; 934 and 283; 934 and 284; 934 and 285; 934 and 286; 934 and 287; 934 and 288; 934 and 289; 934 and 290; 934 and 291; 934 and 292; 935 and 270; 935 and 272; 935 and 273; 935 and 274; 935 and 275; 935 and 276; 935 and 277; 935 and 278; 935 and 279; 935 and 280; 935 and 281; 935 and 282; 935 and 283; 935 and 284; 935 and 285; 935 and 286; 935 and 287; 935 and 288; 935 and 289; 935 and 290; 935 and 291; 935 and 292; 936 and 270; 936 and 272; 936 and 273; 936 and 274; 936 and 275; 936 and 276; 936 and 277; 936 and 278; 936 and 279; 936 and 280; 936 and 281; 936 and 282; 936 and 283; 936 and 284; 936 and 285; 936 and 286; 936 and 287; 936 and 288; 936 and 289; 936 and 290; 936 and 291; 936 and 292; 937 and 270; 937 and 272; 937 and 273; 937 and 274; 937 and 275; 937 and 276; 937 and 277; 937 and 278; 937 and 279; 937 and 280; 937 and 281; 937 and 282; 937 and 283; 937 and 284; 937 and 285; 937 and 286; 937 and 287; 937 and 288; 937 and 289; 937 and 290; 937 and 291; 937 and 292; 938 and 270; 938 and 272; 938 and 273; 938 and 274; 938 and 275; 938 and 276; 938 and 277; 938 and 278; 938 and 279; 938 and 280; 938 and 281; 938 and 282; 938 and 283; 938 and 284; 938 and 285; 938 and 286; 938 and 287; 938 and 288; 938 and 289; 938 and 290; 938 and 291; 938 and 292; 950 and 275; 951 and 275; 952 and 275; 953 and 275; 954 and 275; or 955 and 275.
[0064] Embodiment 13 is a composition comprising a first and a second nucleic acid molecule, wherein the first nucleic acid molecule encodes a sRGN endonuclease (e.g., sRGN3.1, sRGN3.3, or sRGN4) and optionally a first or a first and second guide RNA, and the second nucleic acid molecule comprises a first or a first and second guide RNA, wherein the first guide RNA comprises a first sequence and the second guide RNAs comprises a second sequence from any one the following pairs of first and second sequences: SEQ ID NOs: 200 and 201; 200 and 202; 200 and 203; 200 and 204; 200 and 205; 200 and 206; 200 and 207; 200 and 208; 201 and 202; 201 and 203; 201 and 204; 201 and 205; 201 and 206; 201 and 207; 201 and 208; 202 and 203; 202 and 204; 202 and 205; 202 and 206; 202 and 207; 202 and 208; 203 and 204; 203 and 205; 203 and 206; 203 and 207; 203 and 208; 204 and 205; 204 and 206; 204 and 207; 204 and 208; 205 and 206; 205 and 207; 205 and 208; 206 and 207; 206 and 208; 207 and 208; 231 and 232; 231 and 233; 231 and 234; 231 and 235; 231 and 236; 231 and 237; 231 and 238; 231 and 239; 231 and 240; 231 and 241; 231 and 242; 232 and 233; 232 and 234; 232 and 235; 232 and 236; 232 and 237; 232 and 238; 232 and 239; 232 and 240; 232 and 241; 232 and 242; 233 and 234; 233 and 235; 233 and 236; 233 and 237; 233 and 238; 233 and 239; 233 and 240; 233 and 241; 233 and 242; 234 and 235; 234 and 236; 234 and 237; 234 and 238; 234 and 239; 234 and 240; 234 and 241; 234 and 242; 235 and 236; 235 and 237; 235 and 238; 235 and 239; 235 and 240; 235 and 241; 235 and 242; 236 and 237; 236 and 238; 236 and 239; 236 and 240; 236 and 241; 236 and 242; 237 and 238; 237 and 239; 237 and 240; 237 and 241; 237 and 242; 238 and 239; 238 and 240; 238 and 241; 238 and 242; 239 and 240; 239 and 241; 239 and 242; 240 and 241; 240 and 242; 241 and 242; 270 and 271; 270 and 272; 270 and 273; 270 and 274; 270 and 275; 270 and 276; 270 and 277; 270 and 278; 270 and 279; 270 and 280; 270 and 281; 270 and 282; 270 and 283; 270 and 284; 270 and 285; 270 and 286; 270 and 287; 270 and 288; 270 and 289; 270 and 290; 270 and 291; 270 and 292; 271 and 272; 271 and 273; 271 and 274; 271 and 275; 271 and 276; 271 and 277; 271 and 278; 271 and 279; 271 and 280; 271 and 281; 271 and 282; 271 and 283; 271 and 284; 271 and 285; 271 and 286; 271 and 287; 271 and 288; 271 and 289; 271 and 290; 271 and 291; 271 and 292; 272 and 273; 272 and 274; 272 and 275; 272 and 276; 272 and 277; 272 and 278; 272 and 279; 272 and 280; 272 and 281; 272 and 282; 272 and 283; 272 and 284; 272 and 285; 272 and 286; 272 and 287; 272 and 288; 272 and 289; 272 and 290; 272 and 291; 272 and 292; 273 and 274; 273 and 275; 273 and 276; 273 and 277; 273 and 278; 273 and 279; 273 and 280; 273 and 281; 273 and 282; 273 and 283; 273 and 284; 273 and 285; 273 and 286; 273 and 287; 273 and 288; 273 and 289; 273 and 290; 273 and 291; 273 and 292; 274 and 275; 274 and 276; 274 and 277; 274 and 278; 274 and 279; 274 and 280; 274 and 281; 274 and 282; 274 and 283; 274 and 284; 274 and 285; 274 and 286; 274 and 287; 274 and 288; 274 and 289; 274 and 290; 274 and 291; 274 and 292; 275 and 276; 275 and 277; 275 and 278; 275 and 279; 275 and 280; 275 and 281; 275 and 282; 275 and 283; 275 and 284; 275 and 285; 275 and 286; 275 and 287; 275 and 288; 275 and 289; 275 and 290; 275 and 291; 275 and 292; 276 and 277; 276 and 278; 276 and 279; 276 and 280; 276 and 281; 276 and 282; 276 and 283; 276 and 284; 276 and 285; 276 and 286; 276 and 287; 276 and 288; 276 and 289; 276 and 290; 276 and 291; 276 and 292; 277 and 278; 277 and 279; 277 and 280; 277 and 281; 277 and 282; 277 and 283; 277 and 284; 277 and 285; 277 and 286; 277 and 287; 277 and 288; 277 and 289; 277 and 290; 277 and 291; 277 and 292; 278 and 279; 278 and 280; 278 and 281; 278 and 282; 278 and 283; 278 and 284; 278 and 285; 278 and 286; 278 and 287; 278 and 288; 278 and 289; 278 and 290; 278 and 291; 278 and 292; 279 and 280; 279 and 281; 279 and 282; 279 and 283; 279 and 284; 279 and 285; 279 and 286; 279 and 287; 279 and 288; 279 and 289; 279 and 290; 279 and 291; 279 and 292; 280 and 281; 280 and 282; 280 and 283; 280 and 284; 280 and 285; 280 and 286; 280 and 287; 280 and 288; 280 and 289; 280 and 290; 280 and 291; 280 and 292; 281 and 282; 281 and 283; 281 and 284; 281 and 285; 281 and 286; 281 and 287; 281 and 288; 281 and 289; 281 and 290; 281 and 291; 281 and 292; 282 and 283; 282 and 284; 282 and 285; 282 and 286; 282 and 287; 282 and 288; 282 and 289; 282 and 290; 282 and 291; 282 and 292; 283 and 284; 283 and 285; 283 and 286; 283 and 287; 283 and 288; 283 and 289; 283 and 290; 283 and 291; 283 and 292; 284 and 285; 284 and 286; 284 and 287; 284 and 288; 284 and 289; 284 and 290; 284 and 291; 284 and 292; 285 and 286; 285 and 287; 285 and 288; 285 and 289; 285 and 290; 285 and 291; 285 and 292; 286 and 287; 286 and 288; 286 and 289; 286 and 290; 286 and 291; 286 and 292; 287 and 288; 287 and 289; 287 and 290; 287 and 291; 287 and 292; 288 and 289; 288 and 290; 288 and 291; 288 and 292; 289 and 290; 289 and 291; 289 and 292; 290 and 291; 290 and 292; 291 and 292; 924 and 270; 924 and 272; 924 and 273; 924 and 274; 924 and 275; 924 and 276; 924 and 277; 924 and 278; 924 and 279; 924 and 280; 924 and 281; 924 and 282; 924 and 283; 924 and 284; 924 and 285; 924 and 286; 924 and 287; 924 and 288; 924 and 289; 924 and 290; 924 and 291; 924 and 292; 925 and 270; 925 and 272; 925 and 273; 925 and 274; 925 and 275; 925 and 276; 925 and 277; 925 and 278; 925 and 279; 925 and 280; 925 and 281; 925 and 282; 925 and 283; 925 and 284; 925 and 285; 925 and 286; 925 and 287; 925 and 288; 925 and 289; 925 and 290; 925 and 291; 925 and 292; 926 and 270; 926 and 272; 926 and 273; 926 and 274; 926 and 275; 926 and 276; 926 and 277; 926 and 278; 926 and 279; 926 and 280; 926 and 281; 926 and 282; 926 and 283; 926 and 284; 926 and 285; 926 and 286; 926 and 287; 926 and 288; 926 and 289; 926 and 290; 926 and 291; 926 and 292; 927 and 270; 927 and 272; 927 and 273; 927 and 274; 927 and 275; 927 and 276; 927 and 277; 927 and 278; 927 and 279; 927 and 280; 927 and 281; 927 and 282; 927 and 283; 927 and 284; 927 and 285; 927 and 286; 927 and 287; 927 and 288; 927 and 289; 927 and 290; 927 and 291; 927 and 292; 928 and 270; 928 and 272; 928 and 273; 928 and 274; 928 and 275; 928 and 276; 928 and 277; 928 and 278; 928 and 279; 928 and 280; 928 and 281; 928 and 282; 928 and 283; 928 and 284; 928 and 285; 928 and 286; 928 and 287; 928 and 288; 928 and 289; 928 and 290; 928 and 291; 928 and 292; 929 and 270; 929 and 272; 929 and 273; 929 and 274; 929 and 275; 929 and 276; 929 and 277; 929 and 278; 929 and 279; 929 and 280; 929 and 281; 929 and 282; 929 and 283; 929 and 284; 929 and 285; 929 and 286; 929 and 287; 929 and 288; 929 and 289; 929 and 290; 929 and 291; 929 and 292; 930 and 270; 930 and 272; 930 and 273; 930 and 274; 930 and 275; 930 and 276; 930 and 277; 930 and 278; 930 and 279; 930 and 280; 930 and 281; 930 and 282; 930 and 283; 930 and 284; 930 and 285; 930 and 286; 930 and 287; 930 and 288; 930 and 289; 930 and 290; 930 and 291; 930 and 292; 931 and 270; 931 and 272; 931 and 273; 931 and 274; 931 and 275; 931 and 276; 931 and 277; 931 and 278; 931 and 279; 931 and 280; 931 and 281; 931 and 282; 931 and 283; 931 and 284; 931 and 285; 931 and 286; 931 and 287; 931 and 288; 931 and 289; 931 and 290; 931 and 291; 931 and 292; 932 and 270; 932 and 272; 932 and 273; 932 and 274; 932 and 275; 932 and 276; 932 and 277; 932 and 278; 932 and 279; 932 and 280; 932 and 281; 932 and 282; 932 and 283; 932 and 284; 932 and 285; 932 and 286; 932 and 287; 932 and 288; 932 and 289; 932 and 290; 932 and 291; 932 and 292; 933 and 270; 933 and 272; 933 and 273; 933 and 274; 933 and 275; 933 and 276; 933 and 277; 933 and 278; 933 and 279; 933 and 280; 933 and 281; 933 and 282; 933 and 283; 933 and 284; 933 and 285; 933 and 286; 933 and 287; 933 and 288; 933 and 289; 933 and 290; 933 and 291; 933 and 292; 934 and 270; 934 and 272; 934 and 273; 934 and 274; 934 and 275; 934 and 276; 934 and 277; 934 and 278; 934 and 279; 934 and 280; 934 and 281; 934 and 282; 934 and 283; 934 and 284; 934 and 285; 934 and 286; 934 and 287; 934 and 288; 934 and 289; 934 and 290; 934 and 291; 934 and 292; 935 and 270; 935 and 272; 935 and 273; 935 and 274; 935 and 275; 935 and 276; 935 and 277; 935 and 278; 935 and 279; 935 and 280; 935 and 281; 935 and 282; 935 and 283; 935 and 284; 935 and 285; 935 and 286; 935 and 287; 935 and 288; 935 and 289; 935 and 290; 935 and 291; 935 and 292; 936 and 270; 936 and 272; 936 and 273; 936 and 274; 936 and 275; 936 and 276; 936 and 277; 936 and 278; 936 and 279; 936 and 280; 936 and 281; 936 and 282; 936 and 283; 936 and 284; 936 and 285; 936 and 286; 936 and 287; 936 and 288; 936 and 289; 936 and 290; 936 and 291; 936 and 292; 937 and 270; 937 and 272; 937 and 273; 937 and 274; 937 and 275; 937 and 276; 937 and 277; 937 and 278; 937 and 279; 937 and 280; 937 and 281; 937 and 282; 937 and 283; 937 and 284; 937 and 285; 937 and 286; 937 and 287; 937 and 288; 937 and 289; 937 and 290; 937 and 291; 937 and 292; 938 and 270; 938 and 272; 938 and 273; 938 and 274; 938 and 275; 938 and 276; 938 and 277; 938 and 278; 938 and 279; 938 and 280; 938 and 281; 938 and 282; 938 and 283; 938 and 284; 938 and 285; 938 and 286; 938 and 287; 938 and 288; 938 and 289; 938 and 290; 938 and 291; 938 and 292; 950 and 275; 951 and 275; 952 and 275; 953 and 275; 954 and 275; or 955 and 275.
[0065] Embodiment 14 is a composition of embodiment 13, wherein the sRGN endonuclease comprises an amino acid sequence that is at least 80%, 85%, 90%, 91%, 92%, 93%, 94%, 95%, 96%, 97%, 98%, 99%, or 100% identical to the sequence of any one of SEQ ID Nos: 7024, 7026, or 7027.
[0066] Embodiment 15 is a composition of embodiment 13 or 14, wherein the sRGN endonuclease is encoded by a nucleic acid sequence that is at least 80%, 85%, 90%, 91%, 92%, 93%, 94%, 95%, 96%, 97%, 98%, 99%, or 100% identical to the sequence of any one of SEQ ID Nos: 917, 919 or 920.
[0067] Embodiment 16 is a composition of any one of the preceding embodiments, comprising at least two guide RNAs, wherein once expressed in vitro or in vivo in combination with an RNA-guided endonuclease, the at least two guide RNAs facilitate a 3n+1 edit of exon 45, 51 or 53 of the dystrophin gene, wherein “n” is any negative whole number (e.g., any whole number between −10 and −75).
[0068] Embodiment 17 is a composition of any one of the preceding embodiments, comprising at least two guide RNAs, wherein once expressed in vitro or in vivo in combination with an RNA-guided endonuclease, the at least two guide RNAs target exon 45, 51 or 53 of the dystrophin gene and are capable of excising a nucleic acid that is at least 26, 29, 32, 35, 38, 41, 44, 47, 50, 53, 56, 59, 62, 65, 68, 71, 74, 77, 80, 83, 86, 89, 92, 95, 98, 101, 104, 107, 110, 113, 116, 119, 122, 125, 128, 131, 134, 137, 140, 143, 146, 149, 152, 155, 158, 161, 164, 167, 170, 173, 176, 179, 182, 185, 188, 191, 194, 197, 200, 203, 206, 209, 212, 215, or 218 nucleotides in length.
[0069] Embodiment 18 is a composition of any one of the preceding embodiments, comprising at least two guide RNAs, wherein once expressed in vitro or in vivo in combination with an RNA-guided endonuclease, the at least two guide RNAs facilitate a 3n+2 edit of exon 44 or 50 of the dystrophin gene, wherein “n” is any negative whole number (e.g., any whole number between −10 and −75).
[0070] Embodiment 19 is a composition of any one of the preceding embodiments, comprising at least two guide RNAs, wherein once expressed in vitro or in vivo in combination with an RNA-guided endonuclease, the at least two guide RNAs target exon 44 or 50 of the dystrophin gene and are capable of excising a nucleic acid that is at least 25, 28, 31, 34, 37, 40, 43, 46, 49, 52, 55, 58, 61, 64, 67, 70, 73, 76, 79, 82, 85, 88, 91, 94, 97, 100, 103, 106, 109, 112, 115, 118, 121, 124, 127, 130, 133, 136, 139, 142, 145, 148, 151, 154, 157, 160, 163, 166, 169, 172, 175, 178, 181, 184, 187, 190, 193, 196, 199, 202, 205, 208, 211, 214, or 217 nucleotides in length.
[0071] Embodiment 20 is a composition of any one of the preceding embodiments, comprising at least two guide RNAs, wherein once expressed in vitro or in vivo in combination with an RNA-guided endonuclease, the at least two guide RNAs excise a portion of an exon, wherein the size of the excised portion of the exon is between 5 and 250 nucleotides in length.
[0072] Embodiment 21 is a composition of any one of the preceding embodiments, comprising at least two guide RNAs, wherein once expressed in vitro or in vivo in combination with an RNA-guided endonuclease, the at least two guide RNAs excise a portion of an exon, wherein the size of the excised portion of the exon is between 5 and 250, 5 and 200, 5 and 150, 5 and 100, 5 and 75, 5 and 50, 5 and 25, 5 and 10, 20 and 250, 20 and 200, 20 and 150, 20 and 100, 20 and 75, 20 and 50, 20 and 25, 50 and 250, 50 and 200, 50 and 150, 50 and 100, and 50 and 75 nucleotides.
[0073] Embodiment 22 is a composition of any one of the preceding embodiments, comprising at least two guide RNAs, wherein once expressed in vitro or in vivo in combination with an RNA-guided endonuclease, the at least two guide RNAs excise a portion of the exon, wherein the size of the excised portion of the exon is between 8 and 167 nucleotides.
[0074] Embodiment 23 is a composition of any one of the preceding embodiments, wherein the one or more guide RNAs is an sgRNA.
[0075] Embodiment 24 is a composition of any one of the preceding embodiments, wherein the one or more guide RNAs is modified.
[0076] Embodiment 25 is a composition of any one of the preceding embodiments, wherein the one or more guide RNAs or nucleic acids are in a vector.
[0077] Embodiment 26 is a composition of embodiment 25, wherein the vector is a viral vector.
[0078] Embodiment 27 is a composition of embodiment 26, wherein the viral vector is an AAV vector.
[0079] Embodiment 28 is a composition of embodiment 27, wherein the AAV vector is an AAV9 vector.
[0080] Embodiment 29 is a composition of any one of the preceding embodiments, wherein the promoter for the one or more guide RNAs is hU6c.
[0081] Embodiment 30 is a composition of any one of the preceding embodiments, wherein the one or more guide RNAs is a guide RNA for SaCas9, and the one or more guide RNAs comprise a scaffold comprising the sequence of SEQ ID NO: 504.
[0082] Embodiment 31 is a composition of any one of the preceding embodiments, wherein the one or more guide RNAs is a guide RNA for SluCas9, and the one or more guide RNAs comprise a scaffold comprising the sequence of SEQ ID NO: 901.
[0083] Embodiment 32 is composition of any one of the preceding embodiments, wherein the one or more guide RNAs is in an AAV vector, wherein the vector comprises from 5′ to 3′ with respect to the plus strand: the reverse complement of a first guide RNA scaffold sequence; the reverse complement of a nucleic acid encoding a first guide RNA sequence; the reverse complement of a promoter for expression of the nucleic acid encoding the first guide RNA sequence; a promoter (e.g., CK8e) for expression of a nucleic acid encoding SaCas9, SluCas9, or a sRGN; a nucleic acid encoding a SaCas9, SluCas9, or a sRGN (e.g., sRGN3.1, sRGN3,3, or sRGN4); a polyadenylation sequence; a promoter for expression of a second guide RNA sequence in the same direction as the promoter for SaCas9, SluCas9, or the sRGN; a second guide RNA guide sequence; and a second guide RNA scaffold sequence.
[0084] Embodiment 33 is a composition of embodiment 32, wherein:
   [0085] i) the first guide RNA sequence comprises the sequence of SEQ ID NO: 271 or 281, and the second guide RNA sequence comprises the sequence of SEQ ID NO: 275; or
   [0086] ii) the first guide RNA sequence comprises the sequence of SEQ ID NO: 283, and the second guide RNA sequence comprises the sequence of SEQ ID NO: 290.
[0087] Embodiment 34 is a composition of embodiment 32 or 33, wherein the promoter for expression of a nucleic acid encoding SaCas9, SluCas9, or a sRGN is a promoter for expression of a sRGN; wherein the nucleic acid encoding a SaCas9, SluCas9, or a sRGN encodes for a sRGN, and wherein the sRGN comprises an amino acid sequence that is at least 80%, 85%, 90%, 91%, 92%, 93%, 94%, 95%, 96%, 97%, 98%, 99%, or 100% identical to the sequence of any one of SEQ ID Nos: 7024, 7026, or 7027.
[0088] Embodiment 35 is a composition of embodiment 34, wherein the sRGN is encoded by a nucleic acid sequence that is at least 80%, 85%, 90%, 91%, 92%, 93%, 94%, 95%, 96%, 97%, 98%, 99%, or 100% identical to the sequence of any one of SEQ ID Nos: 917, 919 or 920.
[0089] Embodiment 36 is a composition of any one of embodiments 1-35, wherein the one or more guide RNA sequences, or the first and/or second guide RNA sequence of the pair of guide RNAs, is no more than 16, no more than 17, no more than 18, no more than 19, no more than 20, no more than 21, or no more than 22 nucleotides in length.
[0090] Embodiment 37 is a method of treating Duchenne Muscular Dystrophy (DMD), the method comprising delivering to a cell the composition of any one of embodiments 1-36.
[0091] Embodiment 38 is a method of excising a portion of the DMD gene, the method comprising delivering to a cell the composition of any one of embodiments 1-36, wherein the size of the excised portion is less than about 250 nucleotides.

### DESCRIPTION OF FIGURES

[0092] FIG. 1 shows editing frequency and indel profiles of selected SaCas9, SaCas9-KKH and SluCas9 sgRNA pairs targeting Exon 51 of DMD gene in HEK293FT cells. Each stack bar represents a sgRNA pair and the bar height depicts the average frequency of the total edit. Different indel profiles for each pair of sgRNAs are represented by using distinct patterns as shown in the key. Error bar denotes the standard deviation for each indel group. The “Guide IDs” in the figure are shown as numbers only and generally correspond to the last digit in the “Guide RNA Name” column of Table 6 for each provided Cas9 type. “RF +1” means a reframing edit by insertion of a single nucleotide. “RF Other” means other reframing edits. “Exon Skipping” means 1) indels overlap with the splice acceptor (AG) (5′-end of the target exon); 2) deletion with ≥9-nt overlap with the splicing window at one of the two guides; or 3) insertion at the exact GT/AG splicing sites and with length≥9-nt at one of the two guides.

[0093] FIGS. 2A and 2B show editing frequency and indel profile of selected SaCas9 and SluCas9 sgRNA pairs targeting Exon 45 or Exon 51 of DMD gene in Human Skeletal Muscle Myoblasts (HsMM) cells. Each stack bar represents a sgRNA pair and the bar height depicts the average frequency of the total edit. Different indel profiles for each pair of sgRNAs are represented by using distinct patterns. FIG. 2A shows editing frequency and profile as calculated by Inference of CRISPR Edit (ICE) via Sanger sequencing signal decomposition. FIG. 2B shows editing frequency and profile as calculated by next generation sequencing (NGS). NA denotes data not available due to the failed QC at the step of analysis. Error bars denote the standard deviation for each indel group. The “Guide IDs” in the figure are shown as numbers only and generally correspond to the last digit in the “Guide RNA Name” column of Table 6 for each provided Cas9 type. “RF +1” means a refraining edit by insertion of a single nucleotide. “RF Other” means other refraining edits. “Exon Skipping” means 1) indels overlap with the splice acceptor (AG) (5′-end of the target exon); 2) deletion with ≥9-nt overlap with the splicing window at one of the two guides; or 3) insertion at the exact GT/AG splicing sites and with length≥9-nt at one of the two guides.

[0094] FIG. 3 shows editing frequency and indel profile of selected SaCas9, SaCas9-KKH and SluCas9 sgRNA pairs within exon 53 in HEK293FT cells. Each bar represents a sgRNA or sgRNA pair and the bar height depicts the average total indel frequency. Indel profiles are shown for each sgRNA using distinct patterns. Error bar=standard deviation for each indel group. The guide RNAs shown in the figure generally correspond to the “Guide RNA Name” column of Table 6 (e.g., E53SL4 in FIG. 3 corresponds to E53Slu4 in Table 6, E53SL23 in FIG. 3 corresponds to E53Slu23). “+1 bp” means a refraining edit by insertion of a single nucleotide.

[0095] FIGS. 4A-B show the method of determining exemplary guide pairs for exons 44 and 50. FIG. 4A shows the refraining for the respective exons (44 and 50) based on neighboring exons. FIG. 4B shows the refraining window and last premature stop codon for exon 44 or 50.

[0096] FIGS. 5A-B are schematics showing six representative vector designs. White arrows indicate directionality of expression of the sgRNA(s), while the black arrows indicate directionality of the Cas9 protein. In a particular embodiment, the Cas9 promoter may be CK8e. “Pol III” refers to a representative promoter for the expression of sgRNAs, “g1” and “g2” each refer to a guide sequence, “scaffold” refers to the scaffold of a guide RNA, and “pa” refers to a polyadenylation sequence. FIG. 5A shows Designs 1-4. FIG. 5B shows Designs 5 and 6, which are specific variations of Design 2 (shown generically in FIG. 5A), wherein the Cas9 is SluCas9, with specific guide sequences, promoters, scaffold, and NLS sequences. Design 5 and Design 6 differ only in the order in which the guide sequences are presented. Design 5 depicts the Slu7 guide sequence in the first guide position and the Slu3 guide in the second guide position. Design 6 depicts the Slu3 guide sequence in the first guide position and the Slu7 guide sequence in the second guide position.

[0097] FIGS. 6A and 6B show editing frequency and indel profile of selected SluCas9 sgRNA pairs targeting Exon 45 or Exon 51 of the DMD gene in HsMM cells. Each stack bar represents a sgRNA pair and the bar height depicts the average frequency of the total edit. Different indel profiles for each pair of sgRNAs are represented by using distinct patterns. FIG. 6A shows editing frequency and profile as calculated by next generation sequencing (NGS) for the guide pairs, where E51Slu31 is targeting the refraining window of Exon 51 of the DMD gene. FIG. 6B shows editing frequency and profile as calculated by next generation sequencing (NGS) for the guide pairs, where E51Slu10 is targeting the refraining window of Exon 51 of the DMD gene. Error bars denote the standard deviation for each indel group. The “Guide IDs” in the figure are shown as numbers only and generally correspond to the last digit in the “Guide RNA Name” column of Table 2 for each provided Cas9 type. “RF Other” means other refraining edits.

[0098] FIGS. 7A and 7B show editing frequency and indel profile of selected SluCas9 sgRNA pairs targeting various exons of the DMD gene in HsMM cells. FIG. 7A shows editing frequency and indel profile of selected SluCas9 sgRNA pairs targeting Exon 51 of the DMD gene in HsMM cells. FIG. 7B shows editing frequency and indel profile of selected SluCas9 sgRNA pairs targeting Exon 45 or Exon 51 of the DMD gene in HsMM cells. In FIGS. 7A and 7B, each stack bar represents a sgRNA pair and the bar height depicts the average frequency of the total edit. Different indel profiles for each pair of sgRNAs are represented by using distinct patterns. Editing frequencies and profiles are as calculated by next generation sequencing (NGS) for three guide pairs, in three doses of RNP; high (H), medium (M), and low (L). Error bars denote the standard deviation for each indel group. The “Guide IDs” in the figures are shown as numbers only and generally correspond to the last digit in the “Guide RNA Name” column of Table 2 for each provided Cas9 type. “RF Other” means other refraining edits.

[0099] FIGS. 8A and 8B show editing frequency and indel profile of selected SluCas9 sgRNA pairs targeting Exon 45 or Exon 51 of the DMD gene in HsMM cells. Each stack bar represents a sgRNA pair and the bar height depicts the average frequency of the total edit. Different indel profiles for each pair of sgRNAs are represented by using distinct patterns. FIG. 8A shows editing frequency and profile as calculated by next generation sequencing (NGS) for the E51Slu10 and E51Slu16 guide pair, where ribonucleoprotein (RNP) stoichiometry varies across the sample set. FIG. 8B shows editing frequency and profile as calculated by next generation sequencing (NGS) for the E51Slu10 and E51Slu26 guide pair, where ribonucleoprotein (RNP) stoichiometry varies across the sample set. Error bars denote the standard deviation for each indel group. The “Guide IDs” in the figure are shown as numbers only and generally correspond to the last digit in the “Guide RNA Name” column of Table 2 for each provided Cas9 type. “RF Other” means other reframing edits.

[0100] FIG. 9 shows the editing frequency of several nucleases (SluCas9, sRGNs 3.1, 3.3, 4) with various sgRNA pairs (Slu14/7, Slu16/23, Slu3/7) that target exon 53 of the DMD gene in human HEK293FT cells. One high-performing sgRNA for exon 45 of the DMD gene was included as a reference (E45Slu18/4). The Slu_v5 scaffold (SEQ ID NO: 901) was used for all samples, except for one triplicate of a E45Slu18/4 sample. Boxplot represents the average total indel frequency of each sgRNA pair. Data are the average of 2-3 replicates. In general, the “gRNAs” in the figure are shown as numbers only and generally correspond to the last digit in the “Guide RNA Name” column of Table 5C and 5D for each provided Cas9 type.

[0101] FIG. 10 shows the editing frequency and indel profile of several nucleases with various sgRNA pairs that target exon 53 of the DMD gene in human HEK293FT cells. One high-performing sgRNA for exon 45 of the DMD gene was included as a reference (E45Slu18/4). Each bar represents a sgRNA pair and the bar height depicts the average total indel frequency. Indel profiles are shown for each sgRNA as follows: black (precision deletion leading to refraining, sometimes referred to as “Precise Deletion”); vertical lines (indels other than precision deletion leading to reframing, sometimes referred to as “Other reframing”); white (all other indels, sometimes referred to as “Other indels”). Data are the average of 2-3 replicates. In general, the “gRNAs” in the figure are shown as numbers only and generally correspond to the last digit in the “Guide RNA Name” column of Table 5C and 5D for each provided Cas9 type.

[0102] FIG. 11 shows a bar graph representing the percentage of productive indels of several nucleases (SluCas9, sRGNs 3.1, 3.3, 4) with various sgRNA pairs that target exon 53 of the DMD gene in human HEK293FT cells. Y-axis represents the percentage of precision deletions over total indels. Data are the average of 2-3 replicates. In general, the “gRNAs” in the figure are shown as numbers only and generally correspond to the last digit in the “Guide RNA Name” column of Table 5C and 5D for each provided Cas9 type.

[0103] FIG. 12 shows a bar graph representing the editing frequency and indel profile of several nucleases (SluCas9, sRGNs 3.1, 3.3, 4) with two different sgRNA pairs (16+23, and 3+7) targeting exon 53 of the DMD gene in primary muscle skeletal myoblast (HsMM) cells. Each bar represents a sgRNA pair and the bar height depicts the average total indel frequency (%). Indel profiles are shown for each sgRNA as follows: black green (precision deletion leading to reframing, sometimes referred to as “Precise Deletion”); vertical lines (indels other than precision deletion leading to refraining, sometimes referred to as “Other reframing”); white (all other indels, sometimes referred to as “Other indels”). Data are the average of 3 replicates.

### DETAILED DESCRIPTION

[0104] Reference will now be made in detail to certain embodiments of the invention, examples of which are illustrated in the accompanying drawings. While the invention is described in conjunction with the illustrated embodiments, it will be understood that they are not intended to limit the invention to those embodiments. On the contrary, the invention is intended to cover all alternatives, modifications, and equivalents, which may be included within the invention as defined by the appended claims and included embodiments.

[0105] Before describing the present teachings in detail, it is to be understood that the disclosure is not limited to specific compositions or process steps, as such may vary. It should be noted that, as used in this specification and the appended claims, the singular form “a”, “an”, and “the” include plural references unless the context clearly dictates otherwise. Thus, for example, reference to “a guide” includes a plurality of guides and reference to “a cell” includes a plurality of cells and the like.

[0106] Numeric ranges are inclusive of the numbers defining the range. Measured and measurable values are understood to be approximate, taking into account significant digits and the error associated with the measurement. Also, the use of “comprise”, “comprises”, “comprising”, “contain”, “contains”, “containing”, “include”, “includes”, and “including” are not intended to be limiting. It is to be understood that both the foregoing general description and detailed description are exemplary and explanatory only and are not restrictive of the teachings.

[0107] Unless specifically noted in the specification, embodiments in the specification that recite “comprising” various components are also contemplated as “consisting of” or “consisting essentially of” the recited components; embodiments in the specification that recite “consisting of” various components are also contemplated as “comprising” or “consisting essentially of” the recited components; and embodiments in the specification that recite “consisting essentially of” various components are also contemplated as “consisting of” or “comprising” the recited components (this interchangeability does not apply to the use of these terms in the claims). The term “or” is used in an inclusive sense, i.e., equivalent to “and/or,” unless the context clearly indicates otherwise.

[0108] The section headings used herein are for organizational purposes only and are not to be construed as limiting the desired subject matter in any way. In the event that any material incorporated by reference contradicts any term defined in this specification or any other express content of this specification, this specification controls. While the present teachings are described in conjunction with various embodiments, it is not intended that the present teachings be limited to such embodiments. On the contrary, the present teachings encompass various alternatives, modifications, and equivalents, as will be appreciated by those of skill in the art.

### I. Definitions

[0109] Unless stated otherwise, the following terms and phrases as used herein are intended to have the following meanings:

[0110] “Polynucleotide,” “nucleic acid,” and “nucleic acid molecule,” are used herein to refer to a multimeric compound comprising nucleosides or nucleoside analogs which have nitrogenous heterocyclic bases or base analogs linked together along a backbone, including conventional RNA, DNA, mixed RNA-DNA, and polymers that are analogs thereof. A nucleic acid “backbone” can be made up of a variety of linkages, including one or more of sugar-phosphodiester linkages, peptide-nucleic acid bonds (“peptide nucleic acids” or PNA; PCT No. WO 95/32305), phosphorothioate linkages, methylphosphonate linkages, or combinations thereof. Sugar moieties of a nucleic acid can be ribose, deoxyribose, or similar compounds with substitutions, e.g., 2′ methoxy or 2′ halide substitutions. Nitrogenous bases can be conventional bases (A, G, C, T, U), analogs thereof (e.g., modified uridines such as 5-methoxyuridine, pseudouridine, or N1-methylpseudouridine, or others); inosine; derivatives of purines or pyrimidines (e.g., N⁴-methyl deoxyguanosine, deaza- or aza-purines, deaza- or aza-pyrimidines, pyrimidine bases with substituent groups at the 5 or 6 position (e.g., 5-methylcytosine), purine bases with a substituent at the 2, 6, or 8 positions, 2-amino-6-methylaminopurine, O⁶-methylguanine, 4-thio-pyrimidines, 4-amino-pyrimidines, 4-dimethylhydrazine-pyrimidines, and O⁴-alkyl-pyrimidines; U.S. Pat. No. 5,378,825 and PCT No. WO 93/13121). For general discussion see The Biochemistry of the Nucleic Acids 5-36, Adams et al., ed., 11^{th} ed., 1992). Nucleic acids can include one or more “abasic” residues where the backbone includes no nitrogenous base for position(s) of the polymer (U.S. Pat. No. 5,585,481). A nucleic acid can comprise only conventional RNA or DNA sugars, bases and linkages, or can include both conventional components and substitutions (e.g., conventional bases with 2′ methoxy linkages, or polymers containing both conventional bases and one or more base analogs). Nucleic acid includes “locked nucleic acid” (LNA), an analogue containing one or more LNA nucleotide monomers with a bicyclic furanose unit locked in an RNA mimicking sugar conformation, which enhance hybridization affinity toward complementary RNA and DNA sequences (Vester and Wengel, 2004, Biochemistry 43(42):13233-41). RNA and DNA have different sugar moieties and can differ by the presence of uracil or analogs thereof in RNA and thymine or analogs thereof in DNA.

[0111] “Guide RNA” and simply “guide” are used herein interchangeably to refer to either a crRNA (also known as CRISPR RNA), or the combination of a crRNA and a trRNA (also known as tracrRNA). The crRNA and trRNA may be associated as a single RNA molecule (single guide RNA, sgRNA) or in two separate RNA molecules (dual guide RNA, dgRNA). “Guide RNA” refers to each type. The trRNA may be a naturally-occurring sequence, or a trRNA sequence with modifications or variations compared to naturally-occurring sequences. For clarity, the terms “guide RNA” or “guide” as used herein, and unless specifically stated otherwise, may refer to an RNA molecule (comprising A, C, G, and U nucleotides) or to a DNA molecule encoding such an RNA molecule (comprising A, C, G, and T nucleotides) or complementary sequences thereof. In general, in the case of a DNA nucleic acid construct encoding a guide RNA, the U residues in any of the RNA sequences described herein may be replaced with T residues, and in the case of a guide RNA construct encoded by any of the DNA sequences described herein, the T residues may be replaced with U residues.

[0112] As used herein, a “spacer sequence,” sometimes also referred to herein and in the literature as a “spacer,” “protospacer,” “guide sequence,” or “targeting sequence” refers to a sequence within a guide RNA that is complementary to a target sequence and functions to direct a guide RNA to a target sequence for cleavage by a Cas9. For clarity, the terms “spacer sequence”, “spacer,” “protospacer,” “guide sequence,” or “targeting sequence” as used herein, and unless specifically stated otherwise, may refer to an RNA molecule (comprising A, C, G, and U nucleotides) or to a DNA molecule encoding such an RNA molecule (comprising A, C, G, and T nucleotides) or complementary sequences thereof. A guide sequence can be 24, 23, 22, 21, 20 or fewer base pairs in length, e.g., in the case of Staphylococcus lugdunensis (i.e., SluCas9) or Staphylococcus aureus (i.e., SaCas9) and related Cas9 homologs/orthologs. In preferred embodiments, a guide/spacer sequence in the case of SluCas9 or SaCas9 is at least 20 base pairs in length, or more specifically, within 20-25 base pairs in length (see, e.g., Schmidt et al., 2021, Nature Communications, “Improved CRISPR genome editing using small highly active and specific engineered RNA-guided nucleases”). Shorter or longer sequences can also be used as guides, e.g., 15-, 16-, 17-, 18-, 19-, 20-, 21-, 22-, 23-, 24-, or 25-nucleotides in length. For example, in some embodiments, the guide sequence comprises at least 16, 17, 18, 19, 20, 21, 22, 23, 24, or 25 contiguous nucleotides of a sequence selected from SEQ ID NOs: 1-159 (for SaCas9, including SaCas9KKH), and 200-292, 924-938, or 950-955 (for SluCas9). In some embodiments, the guide sequence comprises a sequence selected from SEQ ID NOs: 1-159, 200-292, 924-938, or 950-955. In some embodiments, the target sequence is in a gene or on a chromosome, for example, and is complementary to the guide sequence. In some embodiments, the degree of complementarity or identity between a guide sequence and its corresponding target sequence may be about 75%, 80%, 85%, 90%, 95%, 96%, 97%, 98%, 99%, or 100%. For example, in some embodiments, the guide sequence comprises a sequence with about 75%, 80%, 85%, 90%, 95%, 96%, 97%, 98%, 99%, or 100% identity to at least 16, 17, 18, 19, 20, 21, 22, 23, 24, or 25 contiguous nucleotides of a sequence selected from SEQ ID NOs: 1-159, 200-292, 924-938, or 950-955. In some embodiments, the guide sequence comprises a sequence with about 75%, 80%, 85%, 90%, 95%, 96%, 97%, 98%, 99%, or 100% identity to a sequence selected from SEQ ID NOs: 1-159, 200-292, 924-938, or 950-955. In preferred embodiments, a guide/spacer sequence in the case of SluCas9 or SaCas9 is at least 20 base pairs in length, or more specifically, within 20-25 base pairs in length (see, e.g., Schmidt et al., 2021, Nature Communications, “Improved CRISPR genome editing using small highly active and specific engineered RNA-guided nucleases”). In some embodiments, the guide sequence and the target region may be 100% complementary or identical. In other embodiments, the guide sequence and the target region may contain at least one mismatch. For example, the guide sequence and the target sequence may contain 1, 2, 3, or 4 mismatches, where the total length of the target sequence is at least 16, 17, 18, 19, 20 or more base pairs. In some embodiments, the total length of the target sequence/guide is no more than 16, no more than 17, no more than 18, no more than 19, no more than 20, no more than 22, no more than 23, or no more than 24 nucleotides in length. In some embodiments, the guide sequence and the target region may contain 1-4 mismatches where the guide sequence comprises at least 16, 17, 18, 19, 20 or more nucleotides. In some embodiments, the guide sequence and the target region may contain 1, 2, 3, or 4 mismatches where the guide sequence comprises 20 nucleotides. In some embodiments, the guide sequence and the target region do not contain any mismatches.

[0113] In some embodiments, the guide sequence comprises a sequence selected from SEQ ID NOs: 1-159, 200-292, 924-938, or 950-955, wherein if the 5′ terminal nucleotide is not guanine, one or more guanine (g) is added to the sequence at its 5′ end. In some embodiments, the 5′ g or gg is included in some instances for transcription, for example, for expression by the RNA polymerase III-dependent U6 promoter or the T7 promoter. In some embodiments, a 5′ guanine is added to any one of the guide sequences or pairs of guide sequences disclosed herein.

[0114] Target sequences for Cas9s include both the positive and negative strands of genomic DNA (i.e., the sequence given and the sequence's reverse compliment), as a nucleic acid substrate for a Cas9 is a double stranded nucleic acid. Accordingly, where a guide sequence is said to be “complementary to a target sequence”, it is to be understood that the guide sequence may direct a guide RNA to bind to the reverse complement of a target sequence. Thus, in some embodiments, where the guide sequence binds the reverse complement of a target sequence, the guide sequence is identical to certain nucleotides of the target sequence (e.g., the target sequence not including the PAM) except for the substitution of U for T in the guide sequence.

[0115] As used herein, “ribonucleoprotein” (RNP) or “RNP complex” refers to a guide RNA together with a Cas9. In some embodiments, the guide RNA guides the Cas9, such as a SluCas9 or a SaCas9, to a target sequence, and the guide RNA hybridizes with and the agent binds to the target sequence, which can be followed by cleaving or nicking (in the context of a modified “nickase” Cas9).

[0116] As used herein, a first sequence is considered to “comprise a sequence with at least X % identity to” a second sequence if an alignment of the first sequence to the second sequence shows that X % or more of the positions of the second sequence in its entirety are matched by the first sequence. For example, the sequence AAGA comprises a sequence with 100% identity to the sequence AAG because an alignment would give 100% identity in that there are matches to all three positions of the second sequence. The differences between RNA and DNA (generally the exchange of uridine for thymidine or vice versa) and the presence of nucleoside analogs such as modified uridines do not contribute to differences in identity or complementarity among polynucleotides as long as the relevant nucleotides (such as thymidine, uridine, or modified uridine) have the same complement (e.g., adenosine for all of thymidine, uridine, or modified uridine; another example is cytosine and 5-methylcytosine, both of which have guanosine or modified guanosine as a complement). Thus, for example, the sequence 5′-AXG where X is any modified uridine, such as pseudouridine, N1-methyl pseudouridine, or 5-methoxyuridine, is considered 100% identical to AUG in that both are perfectly complementary to the same sequence (5′-CAU). Exemplary alignment algorithms are the Smith-Waterman and Needleman-Wunsch algorithms, which are well-known in the art. One skilled in the art will understand what choice of algorithm and parameter settings are appropriate for a given pair of sequences to be aligned; for sequences of generally similar length and expected identity>50% for amino acids or >75% for nucleotides, the Needleman-Wunsch algorithm with default settings of the Needleman-Wunsch algorithm interface provided by the EBI at the www.ebi.ac.uk web server is generally appropriate. [0033]“mRNA” is used herein to refer to a polynucleotide that is not DNA and comprises an open reading frame that can be translated into a polypeptide (i.e., can serve as a substrate for translation by a ribosome and amino-acylated tRNAs). mRNA can comprise a phosphate-sugar backbone including ribose residues or analogs thereof, e.g., 2′-methoxy ribose residues. In some embodiments, the sugars of an mRNA phosphate-sugar backbone consist essentially of ribose residues, 2′-methoxy ribose residues, or a combination thereof.

[0117] Guide sequences useful in the guide RNA compositions and methods described herein are shown, for example, in Tables 1-6, and throughout the specification.

[0118] As used herein, a “target sequence” refers to a sequence of nucleic acid in a target gene that has complementarity to at least a portion of the guide sequence of the guide RNA. The interaction of the target sequence and the guide sequence directs a Cas9 to bind, and potentially nick or cleave (depending on the activity of the agent), within or near the target sequence.

[0119] As used herein, “treatment” refers to any administration or application of a therapeutic for disease or disorder in a subject, and includes inhibiting the disease or development of the disease (which may occur before or after the disease is formally diagnosed, e.g., in cases where a subject has a genotype that has the potential or is likely to result in development of the disease), arresting its development, relieving one or more symptoms of the disease, curing the disease, or preventing reoccurrence of one or more symptoms of the disease. For example, treatment of DMD may comprise alleviating symptoms of DMD.

[0120] As used herein, “ameliorating” refers to any beneficial effect on a phenotype or symptom, such as reducing its severity, slowing or delaying its development, arresting its development, or partially or completely reversing or eliminating it. In the case of quantitative phenotypes such as expression levels, ameliorating encompasses changing the expression level so that it is closer to the expression level seen in healthy or unaffected cells or individuals.

[0121] A “pharmaceutically acceptable excipient” refers to an agent that is included in a pharmaceutical formulation that is not the active ingredient. Pharmaceutically acceptable excipients may e.g., aid in drug delivery or support or enhance stability or bioavailability.

[0122] The term “about” or “approximately” means an acceptable error for a particular value as determined by one of ordinary skill in the art, which depends in part on how the value is measured or determined.

[0123] As used herein, “Staphylococcus aureus Cas9” may also be referred to as SaCas9, and includes wild type SaCas9 (e.g., SEQ ID NO: 711) and variants thereof. A variant of SaCas9 comprises one or more amino acid changes as compared to SEQ ID NO: 711, including insertion, deletion, or substitution of one or more amino acids, or a chemical modification to one or more amino acids. For clarity, SaCas9KKH is a SaCas9 variant.

[0124] As used herein, “Staphylococcus lugdunensis Cas9” may also be referred to as SluCas9, and includes wild type SluCas9 (e.g., SEQ ID NO: 712) and variants thereof. A variant of SluCas9 comprises one or more amino acid changes as compared to SEQ ID NO: 712, including insertion, deletion, or substitution of one or more amino acids, or a chemical modification to one or more amino acids.

### II. Compositions

[0125] Provided herein are compositions comprising guide RNAs and pairs of guide RNAs useful for treating Duchenne Muscular Dystrophy (DMD). The provided pairs of guide RNAs, when used with the correct endonuclease, function to precisely delete a small portion (e.g., less than about 250 nucleotides) of exon 44, 45, 50, 51, or 53 of the DMD gene. Table 6 provides a listing of guide sequences of guide RNAs, and Tables 1A-5D) provide detailed information regarding these sequences.

### Guides and Guide Pairs

### a) Exon 44:

TABLE 1A
(1) Exon 44 SaCas9 guides:

| Seq | | |
|---|---|---|
| ID | Guide ID or Guide | |
| No. | RNA Name | Guide Sequence |
| 1 | E44Sa1 | ATTTAGCATGTTCCCAATTCTC |
| 2 | E44Sa3 | TCTCAGAAAGACACAAATTCCT |
| 104 | E44SaCas9KKH2 | TACCATTTGTATTTAGCATGTT |
| 105 | E44SaCas9KKH3 | ATTTAGCATGTTCCCAATTCTC |
| 106 | E44SaCas9KKH4 | AACTGTTCAGCTTCTGTTAGCC |
| 107 | E44SaCas9KKH5 | TTCAGCTTCTGTTAGCCACTGA |
| 108 | E44SaCas9KKH6 | CACTGATTAAATATCTTTATAT |
| 109 | E44SaCas9KKH7 | ATGAAAACGCCGCCATTTCTCA |
| 110 | E44SaCas9KKH8 | CCGCCATTTCTCAACAGATCTG |
| 111 | E44SaCas9KKH9 | CAACAGATCTGTCAAATCGCCT |
| 112 | E44SaCas9KKH14 | TAAATACAAATGGTATCTTAAG |
| 113 | E44SaCas9KKH15 | ATGCTAAATACAAATGGTATCT |
| 114 | E44SaCas9KKH16 | AATTGGGAACATGCTAAATACA |
| 115 | E44SaCas9KKH17 | GAGAATTGGGAACATGCTAAAT |
| 116 | E44SaCas9KKH18 | ATTCCTGAGAATTGGGAACATG |
| 117 | E44SaCas9KKH19 | TCTCAGAAAGACACAAATTCCT |
| 118 | E44SaCas9KKH20 | CTGAACAGTTTCTCAGAAAGAC |
| 119 | E44SaCas9KKH21 | AATCAGTGGCTAACAGAAGCTG |
| 120 | E44SaCas9KKH22 | CATTATGATATAAAGATATTTA |
| 121 | E44SaCas9KKH23 | TTTTCATTATGATATAAAGATA |
| 122 | E44SaCas9KKH24 | GGCGGCGTTTTCATTATGATAT |
| 123 | E44SaCas9KKH25 | TGAGAAATGGCGGCGTTTTCAT |
| 124 | E44SaCas9KKH26 | AGGCGATTTGACAGATCTGTTG |
| 125 | E44SaCas9KKH27 | GCTTTTACCTGCAGGCGATTTG |

TABLE 1B
(2) Exon 44 SaCas9 pairs:

| Guide 1 Seq | | | Guide 2 Seq | | |
|---|---|---|---|---|---|
| ID No. | Guide 1 | Guide 1 Sequence | ID No. | Guide 2 | Guide 2 Sequence |
| 1 | E44Sa1 | ATTTAGCATGTTCCCA | 2 | E44Sa3 | TCTCAGAAAGACACAA |
| | | ATTCTC | | | ATTCCT |
| 110 | E44SaCas9KKH8 | CCGCCATTTCTCAACA | 120 | E44SaCas9KKH22 | CATTATGATATAAAGA |
| | | GATCTG | | | TATTTA |
| 110 | E44SaCas9KKH8 | CCGCCATTTCTCAACA | 121 | E44SaCas9KKH23 | TTTTCATTATGATATA |
| | | GATCTG | | | AAGATA |
| 110 | E44SaCas9KKH8 | CCGCCATTTCTCAACA | 122 | E44SaCas9KKH24 | GGCGGCGTTTTCATTA |
| | | GATCTG | | | TGATAT |
| 110 | E44SaCas9KKH8 | CCGCCATTTCTCAACA | 123 | E44SaCas9KKH25 | TGAGAAATGGCGGCGT |
| | | GATCTG | | | TTTCAT |
| 110 | E44SaCas9KKH8 | CCGCCATTTCTCAACA | 124 | E44SaCas9KKH26 | AGGCGATTTGACAGAT |
| | | GATCTG | | | CTGTTG |
| 110 | E44SaCas9KKH8 | CCGCCATTTCTCAACA | 125 | E44SaCas9KKH27 | GCTTTTACCTGCAGGC |
| | | GATCTG | | | GATTTG |
| 111 | E44SaCas9KKH9 | CAACAGATCTGTCAAA | 112 | E44SaCas9KKH14 | TAAATACAAATGGTAT |
| | | TCGCCT | | | CTTAAG |
| 111 | E44SaCas9KKH9 | CAACAGATCTGTCAAA | 113 | E44SaCas9KKH15 | ATGCTAAATACAAATG |
| | | TCGCCT | | | GTATCT |
| 111 | E44SaCas9KKH9 | CAACAGATCTGTCAAA | 114 | E44SaCas9KKH16 | AATTGGGAACATGCTA |
| | | TCGCCT | | | AATACA |
| 111 | E44SaCas9KKH9 | CAACAGATCTGTCAAA | 115 | E44SaCas9KKH17 | GAGAATTGGGAACATG |
| | | TCGCCT | | | CTAAAT |
| 111 | E44SaCas9KKH9 | CAACAGATCTGTCAAA | 116 | E44SaCas9KKH18 | ATTCCTGAGAATTGGG |
| | | TCGCCT | | | AACATG |
| 111 | E44SaCas9KKH9 | CAACAGATCTGTCAAA | 117 | E44SaCas9KKH19 | TCTCAGAAAGACACAA |
| | | TCGCCT | | | ATTCCT |
| 111 | E44SaCas9KKH9 | CAACAGATCTGTCAAA | 118 | E44SaCas9KKH20 | CTGAACAGTTTCTCAG |
| | | TCGCCT | | | AAAGAC |
| 111 | E44SaCas9KKH9 | CAACAGATCTGTCAAA | 119 | E44SaCas9KKH21 | AATCAGTGGCTAACAG |
| | | TCGCCT | | | AAGCTG |
| 111 | E44SaCas9KKH9 | CAACAGATCTGTCAAA | 120 | E44SaCas9KKH22 | CATTATGATATAAAGA |
| | | TCGCCT | | | TATTTA |
| 111 | E44SaCas9KKH9 | CAACAGATCTGTCAAA | 121 | E44SaCas9KKH23 | TTTTCATTATGATATA |
| | | TCGCCT | | | AAGATA |
| 111 | E44SaCas9KKH9 | CAACAGATCTGTCAAA | 122 | E44SaCas9KKH24 | GGCGGCGTTTTCATTA |
| | | TCGCCT | | | TGATAT |
| 111 | E44SaCas9KKH9 | CAACAGATCTGTCAAA | 123 | E44SaCas9KKH25 | TGAGAAATGGCGGCGT |
| | | TCGCCT | | | TTTCAT |
| 111 | E44SaCas9KKH9 | CAACAGATCTGTCAAA | 124 | E44SaCas9KKH26 | AGGCGATTTGACAGAT |
| | | TCGCCT | | | CTGTTG |
| 111 | E44SaCas9KKH9 | CAACAGATCTGTCAAA | 125 | E44SaCas9KKH27 | GCTTTTACCTGCAGGC |
| | | TCGCCT | | | GATTTG |
| 112 | E44SaCas9KKH14 | TAAATACAAATGGTAT | 113 | E44SaCas9KKH15 | ATGCTAAATACAAATG |
| | | CTTAAG | | | GTATCT |
| 112 | E44SaCas9KKH14 | TAAATACAAATGGTAT | 114 | E44SaCas9KKH16 | AATTGGGAACATGCTA |
| | | CTTAAG | | | AATACA |
| 112 | E44SaCas9KKH14 | TAAATACAAATGGTAT | 115 | E44SaCas9KKH17 | GAGAATTGGGAACATG |
| | | CTTAAG | | | CTAAAT |
| 112 | E44SaCas9KKH14 | TAAATACAAATGGTAT | 116 | E44SaCas9KKH18 | ATTCCTGAGAATTGGG |
| | | CTTAAG | | | AACATG |
| 112 | E44SaCas9KKH14 | TAAATACAAATGGTAT | 117 | E44SaCas9KKH19 | TCTCAGAAAGACACAA |
| | | CTTAAG | | | ATTCCT |
| 112 | E44SaCas9KKH14 | TAAATACAAATGGTAT | 118 | E44SaCas9KKH20 | CTGAACAGTTTCTCAG |
| | | CTTAAG | | | AAAGAC |
| 112 | E44SaCas9KKH14 | TAAATACAAATGGTAT | 119 | E44SaCas9KKH21 | AATCAGTGGCTAACAG |
| | | CTTAAG | | | AAGCTG |
| 112 | E44SaCas9KKH14 | TAAATACAAATGGTAT | 120 | E44SaCas9KKH22 | CATTATGATATAAAGA |
| | | CTTAAG | | | TATTTA |
| 112 | E44SaCas9KKH14 | TAAATACAAATGGTAT | 121 | E44SaCas9KKH23 | TTTTCATTATGATATA |
| | | CTTAAG | | | AAGATA |
| 112 | E44SaCas9KKH14 | TAAATACAAATGGTAT | 122 | E44SaCas9KKH24 | GGCGGCGTTTTCATTA |
| | | CTTAAG | | | TGATAT |
| 112 | E44SaCas9KKH14 | TAAATACAAATGGTAT | 123 | E44SaCas9KKH25 | TGAGAAATGGCGGCGT |
| | | CTTAAG | | | TTTCAT |
| 112 | E44SaCas9KKH14 | TAAATACAAATGGTAT | 124 | E44SaCas9KKH26 | AGGCGATTTGACAGAT |
| | | CTTAAG | | | CTGTTG |
| 112 | E44SaCas9KKH14 | TAAATACAAATGGTAT | 125 | E44SaCas9KKH27 | GCTTTTACCTGCAGGC |
| | | CTTAAG | | | GATTTG |
| 113 | E44SaCas9KKH15 | ATGCTAAATACAAATG | 114 | E44SaCas9KKH16 | AATTGGGAACATGCTA |
| | | GTATCT | | | AATACA |
| 113 | E44SaCas9KKH15 | ATGCTAAATACAAATG | 115 | E44SaCas9KKH17 | GAGAATTGGGAACATG |
| | | GTATCT | | | CTAAAT |
| 113 | E44SaCas9KKH15 | ATGCTAAATACAAATG | 116 | E44SaCas9KKH18 | ATTCCTGAGAATTGGG |
| | | GTATCT | | | AACATG |
| 113 | E44SaCas9KKH15 | ATGCTAAATACAAATG | 117 | E44SaCas9KKH19 | TCTCAGAAAGACACAA |
| | | GTATCT | | | ATTCCT |
| 113 | E44SaCas9KKH15 | ATGCTAAATACAAATG | 118 | E44SaCas9KKH20 | CTGAACAGTTTCTCAG |
| | | GTATCT | | | AAAGAC |
| 113 | E44SaCas9KKH15 | ATGCTAAATACAAATG | 119 | E44SaCas9KKH21 | AATCAGTGGCTAACAG |
| | | GTATCT | | | AAGCTG |
| 113 | E44SaCas9KKH15 | ATGCTAAATACAAATG | 120 | E44SaCas9KKH22 | CATTATGATATAAAGA |
| | | GTATCT | | | TATTTA |
| 113 | E44SaCas9KKH15 | ATGCTAAATACAAATG | 121 | E44SaCas9KKH23 | TTTTCATTATGATATA |
| | | GTATCT | | | AAGATA |
| 113 | E44SaCas9KKH15 | ATGCTAAATACAAATG | 122 | E44SaCas9KKH24 | GGCGGCGTTTTCATTA |
| | | GTATCT | | | TGATAT |
| 113 | E44SaCas9KKH15 | ATGCTAAATACAAATG | 123 | E44SaCas9KKH25 | TGAGAAATGGCGGCGT |
| | | GTATCT | | | TTTCAT |
| 113 | E44SaCas9KKH15 | ATGCTAAATACAAATG | 124 | E44SaCas9KKH26 | AGGCGATTTGACAGAT |
| | | GTATCT | | | CTGTTG |
| 113 | E44SaCas9KKH15 | ATGCTAAATACAAATG | 125 | E44SaCas9KKH27 | GCTTTTACCTGCAGGC |
| | | GTATCT | | | GATTTG |
| 114 | E44SaCas9KKH16 | AATTGGGAACATGCTA | 115 | E44SaCas9KKH17 | GAGAATTGGGAACATG |
| | | AATACA | | | CTAAAT |
| 114 | E44SaCas9KKH16 | AATTGGGAACATGCTA | 116 | E44SaCas9KKH18 | ATTCCTGAGAATTGGG |
| | | AATACA | | | AACATG |
| 114 | E44SaCas9KKH16 | AATTGGGAACATGCTA | 117 | E44SaCas9KKH19 | TCTCAGAAAGACACAA |
| | | AATACA | | | ATTCCT |
| 114 | E44SaCas9KKH16 | AATTGGGAACATGCTA | 118 | E44SaCas9KKH20 | CTGAACAGTTTCTCAG |
| | | AATACA | | | AAAGAC |
| 114 | E44SaCas9KKH16 | AATTGGGAACATGCTA | 119 | E44SaCas9KKH21 | AATCAGTGGCTAACAG |
| | | AATACA | | | AAGCTG |
| 114 | E44SaCas9KKH16 | AATTGGGAACATGCTA | 120 | E44SaCas9KKH22 | CATTATGATATAAAGA |
| | | AATACA | | | TATTTA |
| 114 | E44SaCas9KKH16 | AATTGGGAACATGCTA | 121 | E44SaCas9KKH23 | TTTTCATTATGATATA |
| | | AATACA | | | AAGATA |
| 114 | E44SaCas9KKH16 | AATTGGGAACATGCTA | 122 | E44SaCas9KKH24 | GGCGGCGTTTTCATTA |
| | | AATACA | | | TGATAT |
| 114 | E44SaCas9KKH16 | AATTGGGAACATGCTA | 123 | E44SaCas9KKH25 | TGAGAAATGGCGGCGT |
| | | AATACA | | | TTTCAT |
| 114 | E44SaCas9KKH16 | AATTGGGAACATGCTA | 124 | E44SaCas9KKH26 | AGGCGATTTGACAGAT |
| | | AATACA | | | CTGTTG |
| 114 | E44SaCas9KKH16 | AATTGGGAACATGCTA | 125 | E44SaCas9KKH27 | GCTTTTACCTGCAGGC |
| | | AATACA | | | GATTTG |
| 115 | E44SaCas9KKH17 | GAGAATTGGGAACATG | 116 | E44SaCas9KKH18 | ATTCCTGAGAATTGGG |
| | | CTAAAT | | | AACATG |
| 115 | E44SaCas9KKH17 | GAGAATTGGGAACATG | 117 | E44SaCas9KKH19 | TCTCAGAAAGACACAA |
| | | CTAAAT | | | ATTCCT |
| 115 | E44SaCas9KKH17 | GAGAATTGGGAACATG | 118 | E44SaCas9KKH20 | CTGAACAGTTTCTCAG |
| | | CTAAAT | | | AAAGAC |
| 115 | E44SaCas9KKH17 | GAGAATTGGGAACATG | 119 | E44SaCas9KKH21 | AATCAGTGGCTAACAG |
| | | CTAAAT | | | AAGCTG |
| 115 | E44SaCas9KKH17 | GAGAATTGGGAACATG | 120 | E44SaCas9KKH22 | CATTATGATATAAAGA |
| | | CTAAAT | | | TATTTA |
| 115 | E44SaCas9KKH17 | GAGAATTGGGAACATG | 121 | E44SaCas9KKH23 | TTTTCATTATGATATA |
| | | CTAAAT | | | AAGATA |
| 115 | E44SaCas9KKH17 | GAGAATTGGGAACATG | 122 | E44SaCas9KKH24 | GGCGGCGTTTTCATTA |
| | | CTAAAT | | | TGATAT |
| 115 | E44SaCas9KKH17 | GAGAATTGGGAACATG | 123 | E44SaCas9KKH25 | TGAGAAATGGCGGCGT |
| | | CTAAAT | | | TTTCAT |
| 115 | E44SaCas9KKH17 | GAGAATTGGGAACATG | 124 | E44SaCas9KKH26 | AGGCGATTTGACAGAT |
| | | CTAAAT | | | CTGTTG |
| 115 | E44SaCas9KKH17 | GAGAATTGGGAACATG | 125 | E44SaCas9KKH27 | GCTTTTACCTGCAGGC |
| | | CTAAAT | | | GATTTG |
| 116 | E44SaCas9KKH18 | ATTCCTGAGAATTGGG | 117 | E44SaCas9KKH19 | TCTCAGAAAGACACAA |
| | | AACATG | | | ATTCCT |
| 116 | E44SaCas9KKH18 | ATTCCTGAGAATTGGG | 118 | E44SaCas9KKH20 | CTGAACAGTTTCTCAG |
| | | AACATG | | | AAAGAC |
| 116 | E44SaCas9KKH18 | ATTCCTGAGAATTGGG | 119 | E44SaCas9KKH21 | AATCAGTGGCTAACAG |
| | | AACATG | | | AAGCTG |
| 116 | E44SaCas9KKH18 | ATTCCTGAGAATTGGG | 120 | E44SaCas9KKH22 | CATTATGATATAAAGA |
| | | AACATG | | | TATTTA |
| 116 | E44SaCas9KKH18 | ATTCCTGAGAATTGGG | 121 | E44SaCas9KKH23 | TTTTCATTATGATATA |
| | | AACATG | | | AAGATA |
| 116 | E44SaCas9KKH18 | ATTCCTGAGAATTGGG | 122 | E44SaCas9KKH24 | GGCGGCGTTTTCATTA |
| | | AACATG | | | TGATAT |
| 116 | E44SaCas9KKH18 | ATTCCTGAGAATTGGG | 123 | E44SaCas9KKH25 | TGAGAAATGGCGGCGT |
| | | AACATG | | | TTTCAT |
| 116 | E44SaCas9KKH18 | ATTCCTGAGAATTGGG | 124 | E44SaCas9KKH26 | AGGCGATTTGACAGAT |
| | | AACATG | | | CTGTTG |
| 116 | E44SaCas9KKH18 | ATTCCTGAGAATTGGG | 125 | E44SaCas9KKH27 | GCTTTTACCTGCAGGC |
| | | AACATG | | | GATTTG |
| 117 | E44SaCas9KKH19 | TCTCAGAAAGACACAA | 118 | E44SaCas9KKH20 | CTGAACAGTTTCTCAG |
| | | ATTCCT | | | AAAGAC |
| 117 | E44SaCas9KKH19 | TCTCAGAAAGACACAA | 119 | E44SaCas9KKH21 | AATCAGTGGCTAACAG |
| | | ATTCCT | | | AAGCTG |
| 117 | E44SaCas9KKH19 | TCTCAGAAAGACACAA | 120 | E44SaCas9KKH22 | CATTATGATATAAAGA |
| | | ATTCCT | | | TATTTA |
| 117 | E44SaCas9KKH19 | TCTCAGAAAGACACAA | 121 | E44SaCas9KKH23 | TTTTCATTATGATATA |
| | | ATTCCT | | | AAGATA |
| 117 | E44SaCas9KKH19 | TCTCAGAAAGACACAA | 122 | E44SaCas9KKH24 | GGCGGCGTTTTCATTA |
| | | ATTCCT | | | TGATAT |
| 117 | E44SaCas9KKH19 | TCTCAGAAAGACACAA | 123 | E44SaCas9KKH25 | TGAGAAATGGCGGCGT |
| | | ATTCCT | | | TTTCAT |
| 117 | E44SaCas9KKH19 | TCTCAGAAAGACACAA | 124 | E44SaCas9KKH26 | AGGCGATTTGACAGAT |
| | | ATTCCT | | | CTGTTG |
| 117 | E44SaCas9KKH19 | TCTCAGAAAGACACAA | 125 | E44SaCas9KKH27 | GCTTTTACCTGCAGGC |
| | | ATTCCT | | | GATTTG |
| 118 | E44SaCas9KKH20 | CTGAACAGTTTCTCAG | 119 | E44SaCas9KKH21 | AATCAGTGGCTAACAG |
| | | AAAGAC | | | AAGCTG |
| 118 | E44SaCas9KKH20 | CTGAACAGTTTCTCAG | 120 | E44SaCas9KKH22 | CATTATGATATAAAGA |
| | | AAAGAC | | | TATTTA |
| 118 | E44SaCas9KKH20 | CTGAACAGTTTCTCAG | 121 | E44SaCas9KKH23 | TTTTCATTATGATATA |
| | | AAAGAC | | | AAGATA |
| 118 | E44SaCas9KKH20 | CTGAACAGTTTCTCAG | 122 | E44SaCas9KKH24 | GGCGGCGTTTTCATTA |
| | | AAAGAC | | | TGATAT |
| 118 | E44SaCas9KKH20 | CTGAACAGTTTCTCAG | 123 | E44SaCas9KKH25 | TGAGAAATGGCGGCGT |
| | | AAAGAC | | | TTTCAT |
| 118 | E44SaCas9KKH20 | CTGAACAGTTTCTCAG | 124 | E44SaCas9KKH26 | AGGCGATTTGACAGAT |
| | | AAAGAC | | | CTGTTG |
| 118 | E44SaCas9KKH20 | CTGAACAGTTTCTCAG | 125 | E44SaCas9KKH27 | GCTTTTACCTGCAGGC |
| | | AAAGAC | | | GATTTG |
| 119 | E44SaCas9KKH21 | AATCAGTGGCTAACAG | 120 | E44SaCas9KKH22 | CATTATGATATAAAGA |
| | | AAGCTG | | | TATTTA |
| 119 | E44SaCas9KKH21 | AATCAGTGGCTAACAG | 121 | E44SaCas9KKH23 | TTTTCATTATGATATA |
| | | AAGCTG | | | AAGATA |
| 119 | E44SaCas9KKH21 | AATCAGTGGCTAACAG | 122 | E44SaCas9KKH24 | GGCGGCGTTTTCATTA |
| | | AAGCTG | | | TGATAT |
| 119 | E44SaCas9KKH21 | AATCAGTGGCTAACAG | 123 | E44SaCas9KKH25 | TGAGAAATGGCGGCGT |
| | | AAGCTG | | | TTTCAT |
| 119 | E44SaCas9KKH21 | AATCAGTGGCTAACAG | 124 | E44SaCas9KKH26 | AGGCGATTTGACAGAT |
| | | AAGCTG | | | CTGTTG |
| 119 | E44SaCas9KKH21 | AATCAGTGGCTAACAG | 125 | E44SaCas9KKH27 | GCTTTTACCTGCAGGC |
| | | AAGCTG | | | GATTTG |
| 120 | E44SaCas9KKH22 | CATTATGATATAAAGA | 121 | E44SaCas9KKH23 | TTTTCATTATGATATA |
| | | TATTTA | | | AAGATA |
| 120 | E44SaCas9KKH22 | CATTATGATATAAAGA | 122 | E44SaCas9KKH24 | GGCGGCGTTTTCATTA |
| | | TATTTA | | | TGATAT |
| 120 | E44SaCas9KKH22 | CATTATGATATAAAGA | 123 | E44SaCas9KKH25 | TGAGAAATGGCGGCGT |
| | | TATTTA | | | TTTCAT |
| 120 | E44SaCas9KKH22 | CATTATGATATAAAGA | 124 | E44SaCas9KKH26 | AGGCGATTTGACAGAT |
| | | TATTTA | | | CTGTTG |
| 120 | E44SaCas9KKH22 | CATTATGATATAAAGA | 125 | E44SaCas9KKH27 | GCTTTTACCTGCAGGC |
| | | TATTTA | | | GATTTG |
| 121 | E44SaCas9KKH23 | TTTTCATTATGATATA | 122 | E44SaCas9KKH24 | GGCGGCGTTTTCATTA |
| | | AAGATA | | | TGATAT |
| 121 | E44SaCas9KKH23 | TTTTCATTATGATATA | 123 | E44SaCas9KKH25 | TGAGAAATGGCGGCGT |
| | | AAGATA | | | TTTCAT |
| 121 | E44SaCas9KKH23 | TTTTCATTATGATATA | 124 | E44SaCas9KKH26 | AGGCGATTTGACAGAT |
| | | AAGATA | | | CTGTTG |
| 121 | E44SaCas9KKH23 | TTTTCATTATGATATA | 125 | E44SaCas9KKH27 | GCTTTTACCTGCAGGC |
| | | AAGATA | | | GATTTG |
| 122 | E44SaCas9KKH24 | GGCGGCGTTTTCATTA | 123 | E44SaCas9KKH25 | TGAGAAATGGCGGCGT |
| | | TGATAT | | | TTTCAT |
| 122 | E44SaCas9KKH24 | GGCGGCGTTTTCATTA | 124 | E44SaCas9KKH26 | AGGCGATTTGACAGAT |
| | | TGATAT | | | CTGTTG |
| 122 | E44SaCas9KKH24 | GGCGGCGTTTTCATTA | 125 | E44SaCas9KKH27 | GCTTTTACCTGCAGGC |
| | | TGATAT | | | GATTTG |
| 123 | E44SaCas9KKH25 | TGAGAAATGGCGGCGT | 124 | E44SaCas9KKH26 | AGGCGATTTGACAGAT |
| | | TTTCAT | | | CTGTTG |
| 123 | E44SaCas9KKH25 | TGAGAAATGGCGGCGT | 125 | E44SaCas9KKH27 | GCTTTTACCTGCAGGC |
| | | TTTCAT | | | GATTTG |
| 124 | E44SaCas9KKH26 | AGGCGATTTGACAGAT | 125 | E44SaCas9KKH27 | GCTTTTACCTGCAGGC |
| | | CTGTTG | | | GATTTG |

TABLE 1C
(3) Exon 44 SluCas9 guides:

| Seq | | |
|---|---|---|
| ID | Guide ID or Guide | |
| No. | RNA Name | Guide Sequence |
| 200 | E44Slu1 | TATTTAGCATGTTCCCAATTCT |
| 201 | E44Slu2 | AACAGATCTGTCAAATCGCCTG |
| 202 | E44Slu4 | TGCTAAATACAAATGGTATCTT |
| 203 | E44Slu5 | ATTGGGAACATGCTAAATACAA |
| 204 | E44Slu6 | AAAGACACAAATTCCTGAGAAT |
| 205 | E44Slu7 | GAAAGACACAAATTCCTGAGAA |
| 206 | E44Slu8 | ATGATATAAAGATATTTAATCA |
| 207 | E44Slu9 | TTGACAGATCTGTTGAGAAATG |
| 208 | E44Slu10 | GATTTGACAGATCTGTTGAGAA |

TABLE 1D
(4) Exon 44 SluCas9 pairs:

| Guide 1 Seq ID No. | Guide 1 | Guide 1 Sequence | Guide 2 Seq ID No. | Guide 2 | Guide 2 Sequence |
|---|---|---|---|---|---|
| 200 | E44SL1 | TATTTAGCATGTTCCCAATTCT | 201 | E44SL2 | AACAGATCTGTCAAATCGCCTG |
| 200 | E44SL1 | TATTTAGCATGTTCCCAATTCT | 202 | E44SL4 | TGCTAAATACAAATGGTATCTT |
| 200 | E44SL1 | TATTTAGCATGTTCCCAATTCT | 203 | E44SL5 | ATTGGGAACATGCTAAATACAA |
| 200 | E44SL1 | TATTTAGCATGTTCCCAATTCT | 204 | E44SL6 | AAAGACACAAATTCCTGAGAAT |
| 200 | E44SL1 | TATTTAGCATGTTCCCAATTCT | 205 | E44SL7 | GAAAGACACAAATTCCTGAGAA |
| 200 | E44SL1 | TATTTAGCATGTTCCCAATTCT | 206 | E44SL8 | ATGATATAAAGATATTTAATCA |
| 200 | E44SL1 | TATTTAGCATGTTCCCAATTCT | 207 | E44SL9 | TTGACAGATCTGTTGAGAAATG |
| 200 | E44SL1 | TATTTAGCATGTTCCCAATTCT | 208 | E44SL10 | GATTTGACAGATCTGTTGAGAA |
| 201 | E44SL2 | AACAGATCTGTCAAATCGCCTG | 202 | E44SL4 | TGCTAAATACAAATGGTATCTT |
| 201 | E44SL2 | AACAGATCTGTCAAATCGCCTG | 203 | E44SL5 | ATTGGGAACATGCTAAATACAA |
| 201 | E44SL2 | AACAGATCTGTCAAATCGCCTG | 204 | E44SL6 | AAAGACACAAATTCCTGAGAAT |
| 201 | E44SL2 | AACAGATCTGTCAAATCGCCTG | 205 | E44SL7 | GAAAGACACAAATTCCTGAGAA |
| 201 | E44SL2 | AACAGATCTGTCAAATCGCCTG | 206 | E44SL8 | ATGATATAAAGATATTTAATCA |
| 201 | E44SL2 | AACAGATCTGTCAAATCGCCTG | 207 | E44SL9 | TTGACAGATCTGTTGAGAAATG |
| 201 | E44SL2 | AACAGATCTGTCAAATCGCCTG | 208 | E44SL10 | GATTTGACAGATCTGTTGAGAA |
| 202 | E44SL4 | TGCTAAATACAAATGGTATCTT | 203 | E44SL5 | ATTGGGAACATGCTAAATACAA |
| 202 | E44SL4 | TGCTAAATACAAATGGTATCTT | 204 | E44SL6 | AAAGACACAAATTCCTGAGAAT |
| 202 | E44SL4 | TGCTAAATACAAATGGTATCTT | 205 | E44SL7 | GAAAGACACAAATTCCTGAGAA |
| 202 | E44SL4 | TGCTAAATACAAATGGTATCTT | 206 | E44SL8 | ATGATATAAAGATATTTAATCA |
| 202 | E44SL4 | TGCTAAATACAAATGGTATCTT | 207 | E44SL9 | TTGACAGATCTGTTGAGAAATG |
| 202 | E44SL4 | TGCTAAATACAAATGGTATCTT | 208 | E44SL10 | GATTTGACAGATCTGTTGAGAA |
| 203 | E44SL5 | ATTGGGAACATGCTAAATACAA | 204 | E44SL6 | AAAGACACAAATTCCTGAGAAT |
| 203 | E44SL5 | ATTGGGAACATGCTAAATACAA | 205 | E44SL7 | GAAAGACACAAATTCCTGAGAA |
| 203 | E44SL5 | ATTGGGAACATGCTAAATACAA | 206 | E44SL8 | ATGATATAAAGATATTTAATCA |
| 203 | E44SL5 | ATTGGGAACATGCTAAATACAA | 207 | E44SL9 | TTGACAGATCTGTTGAGAAATG |
| 203 | E44SL5 | ATTGGGAACATGCTAAATACAA | 208 | E44SL10 | GATTTGACAGATCTGTTGAGAA |
| 204 | E44SL6 | AAAGACACAAATTCCTGAGAAT | 205 | E44SL7 | GAAAGACACAAATTCCTGAGAA |
| 204 | E44SL6 | AAAGACACAAATTCCTGAGAAT | 206 | E44SL8 | ATGATATAAAGATATTTAATCA |
| 204 | E44SL6 | AAAGACACAAATTCCTGAGAAT | 207 | E44SL9 | TTGACAGATCTGTTGAGAAATG |
| 204 | E44SL6 | AAAGACACAAATTCCTGAGAAT | 208 | E44SL10 | GATTTGACAGATCTGTTGAGAA |
| 205 | E44SL7 | GAAAGACACAAATTCCTGAGAA | 206 | E44SL8 | ATGATATAAAGATATTTAATCA |
| 205 | E44SL7 | GAAAGACACAAATTCCTGAGAA | 207 | E44SL9 | TTGACAGATCTGTTGAGAAATG |
| 205 | E44SL7 | GAAAGACACAAATTCCTGAGAA | 208 | E44SL10 | GATTTGACAGATCTGTTGAGAA |
| 206 | E44SL8 | ATGATATAAAGATATTTAATCA | 207 | E44SL9 | TTGACAGATCTGTTGAGAAATG |
| 206 | E44SL8 | ATGATATAAAGATATTTAATCA | 208 | E44SL10 | GATTTGACAGATCTGTTGAGAA |
| 207 | E44SL9 | TTGACAGATCTGTTGAGAAATG | 208 | E44SL10 | GATTTGACAGATCTGTTGAGAA |

### b) Exon 45:

TABLE 2A
(1) Exon 45 SaCas9 guides:

| Seq | | |
|---|---|---|
| ID | Guide ID or Guide | |
| No. | RNA Name | Guide Sequence |
| 3 | E45Sa1 | TCAGGCTTCCCAATTTTTCCTG |
| 4 | E45Sa2 | TAGAATACTGGCATCTGTTTTT |
| 5 | E45Sa3 | TGGCATCTGTTTTTGAGGATTG |
| 6 | E45Sa4 | TTGCCGCTGCCCAATGCCATCC |
| 7 | E45Sa6 | TCTACAGGAAAAATTGGGAAGC |
| 8 | E45Sa7 | GCGGCAAACTGTTGTCAGAACA |
| 9 | E45Sa8 | TTTTGGTATCTTACAGGAACTC |
| 126 | E45SaCas9KKH1 | TGTTTGCAGACCTCCTGCCACC |
| 127 | E45SaCas9KKH2 | CTGCCACCGCAGATTCAGGCTT |
| 128 | E45SaCas9KKH3 | TCAGGCTTCCCAATTTTTCCTG |
| 129 | E45SaCas9KKH4 | TAGAATACTGGCATCTGTTTTT |
| 130 | E45SaCas9KKH5 | TGGCATCTGTTTTTGAGGATTG |
| 131 | E45SaCas9KKH6 | AGGATTGCTGAATTATTTCTTC |
| 132 | E45SaCas9KKH7 | AATTATTTCTTCCCCAGTTGCA |
| 133 | E45SaCas9KKH8 | CAGTTGCATTCAATGTTCTGAC |
| 134 | E45SaCas9KKH9 | TTCTGACAACAGTTTGCCGCTG |
| 135 | E45SaCas9KKH10 | TTGCCGCTGCCCAATGCCATCC |
| 136 | E45SaCas9KKH16 | AAACAGCTGTCAGACAGAAAAA |
| 137 | E45SaCas9KKH17 | GAAGCCTGAATCTGCGGTGGCA |
| 138 | E45SaCas9KKH18 | GAAAAATTGGGAAGCCTGAATC |
| 139 | E45SaCas9KKH19 | TCTACAGGAAAAATTGGGAAGC |
| 140 | E45SaCas9KKH20 | ACAGATGCCAGTATTCTACAGG |
| 141 | E45SaCas9KKH21 | TCAGCAATCCTCAAAAACAGAT |
| 142 | E45SaCas9KKH22 | AATAATTCAGCAATCCTCAAAA |
| 143 | E45SaCas9KKH23 | GCAACTGGGGAAGAAATAATTC |
| 144 | E45SaCas9KKH24 | CATTGAATGCAACTGGGGAAGA |
| 145 | E45SaCas9KKH25 | GAACATTGAATGCAACTGGGGA |
| 146 | E45SaCas9KKH26 | GCGGCAAACTGTTGTCAGAACA |
| 147 | E45SaCas9KKH27 | TTTTGGTATCTTACAGGAACTC |

TABLE 2B
(2) Exon 45 SaCas9 pairs:

| Guide 1 Seq ID | | | Guide 2 Seq ID | | |
|---|---|---|---|---|---|
| No. | Guide | Guide 1 Sequence | No. | Guide | Guide 2 Sequence |
| 3 | E45Sa1 | TCAGGCTTCCCAATTTTTC | 4 | E45Sa2 | TAGAATACTGGCATCTGTT |
| | | CTG | | | TTT |
| 3 | E45Sa1 | TCAGGCTTCCCAATTTTTC | 5 | E45Sa3 | TGGCATCTGTTTTTGAGGA |
| | | CTG | | | TTG |
| 3 | E45Sa1 | TCAGGCTTCCCAATTTTTC | 6 | E45Sa4 | TTGCCGCTGCCCAATGCCA |
| | | CTG | | | TCC |
| 3 | E45Sa1 | TCAGGCTTCCCAATTTTTC | 7 | E45Sa6 | TCTACAGGAAAAATTGGGA |
| | | CTG | | | AGC |
| 3 | E45Sa1 | TCAGGCTTCCCAATTTTTC | 8 | E45Sa7 | GCGGCAAACTGTTGTCAGA |
| | | CTG | | | ACA |
| 3 | E45Sa1 | TCAGGCTTCCCAATTTTTC | 9 | E45Sa8 | TTTTGGTATCTTACAGGAA |
| | | CTG | | | CTC |
| 4 | E45Sa2 | TAGAATACTGGCATCTGTT | 5 | E45Sa3 | TGGCATCTGTTTTTGAGGA |
| | | TTT | | | TTG |
| 4 | E45Sa2 | TAGAATACTGGCATCTGTT | 6 | E45Sa4 | TTGCCGCTGCCCAATGCCA |
| | | TTT | | | TCC |
| 4 | E45Sa2 | TAGAATACTGGCATCTGTT | 7 | E45Sa6 | TCTACAGGAAAAATTGGGA |
| | | TTT | | | AGC |
| 4 | E45Sa2 | TAGAATACTGGCATCTGTT | 8 | E45Sa7 | GCGGCAAACTGTTGTCAGA |
| | | TTT | | | ACA |
| 4 | E45Sa2 | TAGAATACTGGCATCTGTT | 9 | E45Sa8 | TTTTGGTATCTTACAGGAA |
| | | TTT | | | CTC |
| 5 | E45Sa3 | TGGCATCTGTTTTTGAGGA | 6 | E45Sa4 | TTGCCGCTGCCCAATGCCA |
| | | TTG | | | TCC |
| 5 | E45Sa3 | TGGCATCTGTTTTTGAGGA | 7 | E45Sa6 | TCTACAGGAAAAATTGGGA |
| | | TTG | | | AGC |
| 5 | E45Sa3 | TGGCATCTGTTTTTGAGGA | 8 | E45Sa7 | GCGGCAAACTGTTGTCAGA |
| | | TTG | | | ACA |
| 5 | E45Sa3 | TGGCATCTGTTTTTGAGGA | 9 | E45Sa8 | TTTTGGTATCTTACAGGAA |
| | | TTG | | | CTC |
| 6 | E45Sa4 | TTGCCGCTGCCCAATGCCA | 7 | E45Sa6 | TCTACAGGAAAAATTGGGA |
| | | TCC | | | AGC |
| 6 | E45Sa4 | TTGCCGCTGCCCAATGCCA | 8 | E45Sa7 | GCGGCAAACTGTTGTCAGA |
| | | TCC | | | ACA |
| 6 | E45Sa4 | TTGCCGCTGCCCAATGCCA | 9 | E45Sa8 | TTTTGGTATCTTACAGGAA |
| | | TCC | | | CTC |
| 7 | E45Sa6 | TCTACAGGAAAAATTGGGA | 8 | E45Sa7 | GCGGCAAACTGTTGTCAGA |
| | | AGC | | | ACA |
| 7 | E45Sa6 | TCTACAGGAAAAATTGGGA | 9 | E45Sa8 | TTTTGGTATCTTACAGGAA |
| | | AGC | | | CTC |
| 8 | E45Sa7 | GCGGCAAACTGTTGTCAGA | 9 | E45Sa8 | TTTTGGTATCTTACAGGAA |
| | | ACA | | | CTC |
| 126 | E45SaCas9KKH1 | TGTTTGCAGACCTCCTGCC | 127 | E45SaCas9KKH2 | CTGCCACCGCAGATTCAGG |
| | | ACC | | | CTT |
| 126 | E45SaCas9KKH1 | TGTTTGCAGACCTCCTGCC | 128 | E45SaCas9KKH3 | TCAGGCTTCCCAATTTTTC |
| | | ACC | | | CTG |
| 126 | E45SaCas9KKH1 | TGTTTGCAGACCTCCTGCC | 129 | E45SaCas9KKH4 | TAGAATACTGGCATCTGTT |
| | | ACC | | | TTT |
| 126 | E45SaCas9KKH1 | TGTTTGCAGACCTCCTGCC | 130 | E45SaCas9KKH8 | TGGCATCTGTTTTTGAGGA |
| | | ACC | | | TTG |
| 126 | E45SaCas9KKH1 | TGTTTGCAGACCTCCTGCC | 131 | E45SaCas9KKH6 | AGGATTGCTGAATTATTTC |
| | | ACC | | | TTC |
| 126 | E45SaCas9KKH1 | TGTTTGCAGACCTCCTGCC | 132 | E45SaCas9KKH7 | AATTATTTCTTCCCCAGTT |
| | | ACC | | | GCA |
| 126 | E45SaCas9KKH1 | TGTTTGCAGACCTCCTGCC | 133 | E45SaCas9KKH8 | CAGTTGCATTCAATGTTCT |
| | | ACC | | | GAC |
| 126 | E45SaCas9KKH1 | TGTTTGCAGACCTCCTGCC | 134 | E45SaCas9KKH9 | TTCTGACAACAGTTTGCCG |
| | | ACC | | | CTG |
| 126 | E45SaCas9KKH1 | TGTTTGCAGACCTCCTGCC | 135 | E45SaCas9KKH10 | TTGCCGCTGCCCAATGCCA |
| | | ACC | | | TCC |
| 126 | E45SaCas9KKH1 | TGTTTGCAGACCTCCTGCC | 136 | E45SaCas9KKH16 | AAACAGCTGTCAGACAGAA |
| | | ACC | | | AAA |
| 126 | E45SaCas9KKH1 | TGTTTGCAGACCTCCTGCC | 137 | E45SaCas9KKH17 | GAAGCCTGAATCTGCGGTG |
| | | ACC | | | GCA |
| 126 | E45SaCas9KKH1 | TGTTTGCAGACCTCCTGCC | 138 | E45SaCas9KKH18 | GAAAAATTGGGAAGCCTGA |
| | | ACC | | | ATC |
| 126 | E45SaCas9KKH1 | TGTTTGCAGACCTCCTGCC | 139 | E45SaCas9KKH19 | TCTACAGGAAAAATTGGGA |
| | | ACC | | | AGC |
| 126 | E45SaCas9KKH1 | TGTTTGCAGACCTCCTGCC | 140 | E45SaCas9KKH20 | ACAGATGCCAGTATTCTAC |
| | | ACC | | | AGG |
| 126 | E45SaCas9KKH1 | TGTTTGCAGACCTCCTGCC | 141 | E45SaCas9KKH21 | TCAGCAATCCTCAAAAACA |
| | | ACC | | | GAT |
| 126 | E45SaCas9KKH1 | TGTTTGCAGACCTCCTGCC | 142 | E45SaCas9KKH22 | AATAATTCAGCAATCCTCA |
| | | ACC | | | AAA |
| 126 | E45SaCas9KKH1 | TGTTTGCAGACCTCCTGCC | 143 | E45SaCas9KKH23 | GCAACTGGGGAAGAAATAA |
| | | ACC | | | TTC |
| 126 | E45SaCas9KKH1 | TGTTTGCAGACCTCCTGCC | 144 | E45SaCas9KKH24 | CATTGAATGCAACTGGGGA |
| | | ACC | | | AGA |
| 126 | E45SaCas9KKH1 | TGTTTGCAGACCTCCTGCC | 145 | E45SaCas9KKH25 | GAACATTGAATGCAACTGG |
| | | ACC | | | GGA |
| 126 | E45SaCas9KKH1 | TGTTTGCAGACCTCCTGCC | 146 | E45SaCas9KKH26 | GCGGCAAACTGTTGTCAGA |
| | | ACC | | | ACA |
| 126 | E45SaCas9KKH1 | TGTTTGCAGACCTCCTGCC | 147 | E45SaCas9KKH27 | TTTTGGTATCTTACAGGAA |
| | | ACC | | | CTC |
| 127 | E45SaCas9KKH2 | CTGCCACCGCAGATTCAGG | 128 | E45SaCas9KKH3 | TCAGGCTTCCCAATTTTTC |
| | | CTT | | | CTG |
| 127 | E45SaCas9KKH2 | CTGCCACCGCAGATTCAGG | 129 | E45SaCas9KKH4 | TAGAATACTGGCATCTGTT |
| | | CTT | | | TTT |
| 127 | E45SaCas9KKH2 | CTGCCACCGCAGATTCAGG | 130 | E45SaCas9KKH5 | TGGCATCTGTTTTTGAGGA |
| | | CTT | | | TTG |
| 127 | E45SaCas9KKH2 | CTGCCACCGCAGATTCAGG | 131 | E45SaCas9KKH6 | AGGATTGCTGAATTATTTC |
| | | CTT | | | TTC |
| 127 | E45SaCas9KKH2 | CTGCCACCGCAGATTCAGG | 132 | E45SaCas9KKH7 | AATTATTTCTTCCCCAGTT |
| | | CTT | | | GCA |
| 127 | E45SaCas9KKH2 | CTGCCACCGCAGATTCAGG | 133 | E45SaCas9KKH8 | CAGTTGCATTCAATGTTCT |
| | | CTT | | | GAC |
| 127 | E45SaCas9KKH2 | CTGCCACCGCAGATTCAGG | 134 | E45SaCas9KKH9 | TTCTGACAACAGTTTGCCG |
| | | CTT | | | CTG |
| 127 | E45SaCas9KKH2 | CTGCCACCGCAGATTCAGG | 135 | E45SaCas9KKH10 | TTGCCGCTGCCCAATGCCA |
| | | CTT | | | TCC |
| 127 | E45SaCas9KKH2 | CTGCCACCGCAGATTCAGG | 136 | E45SaCas9KKH16 | AAACAGCTGTCAGACAGAA |
| | | CTT | | | AAA |
| 127 | E45SaCas9KKH2 | CTGCCACCGCAGATTCAGG | 137 | E45SaCas9KKH17 | GAAGCCTGAATCTGCGGTG |
| | | CTT | | | GCA |
| 127 | E45SaCas9KKH2 | CTGCCACCGCAGATTCAGG | 138 | E45SaCas9KKH18 | GAAAAATTGGGAAGCCTGA |
| | | CTT | | | ATC |
| 127 | E45SaCas9KKH2 | CTGCCACCGCAGATTCAGG | 139 | E45SaCas9KKH19 | TCTACAGGAAAAATTGGGA |
| | | CTT | | | AGC |
| 127 | E45SaCas9KKH2 | CTGCCACCGCAGATTCAGG | 140 | E45SaCas9KKH20 | ACAGATGCCAGTATTCTAC |
| | | CTT | | | AGG |
| 127 | E45SaCas9KKH2 | CTGCCACCGCAGATTCAGG | 141 | E45SaCas9KKH21 | TCAGCAATCCTCAAAAACA |
| | | CTT | | | GAT |
| 127 | E45SaCas9KKH2 | CTGCCACCGCAGATTCAGG | 142 | E45SaCas9KKH22 | AATAATTCAGCAATCCTCA |
| | | CTT | | | AAA |
| 127 | E45SaCas9KKH2 | CTGCCACCGCAGATTCAGG | 143 | E45SaCas9KKH23 | GCAACTGGGGAAGAAATAA |
| | | CTT | | | TTC |
| 127 | E45SaCas9KKH2 | CTGCCACCGCAGATTCAGG | 144 | E45SaCas9KKH24 | CATTGAATGCAACTGGGGA |
| | | CTT | | | AGA |
| 127 | E45SaCas9KKH2 | CTGCCACCGCAGATTCAGG | 145 | E45SaCas9KKH25 | GAACATTGAATGCAACTGG |
| | | CTT | | | GGA |
| 127 | E45SaCas9KKH2 | CTGCCACCGCAGATTCAGG | 146 | E45SaCas9KKH26 | GCGGCAAACTGTTGTCAGA |
| | | CTT | | | ACA |
| 127 | E45SaCas9KKH2 | CTGCCACCGCAGATTCAGG | 147 | E45SaCas9KKH27 | TTTTGGTATCTTACAGGAA |
| | | CTT | | | CTC |
| 128 | E45SaCas9KKH3 | TCAGGCTTCCCAATTTTTC | 129 | E45SaCas9KKH4 | TAGAATACTGGCATCTGTT |
| | | CTG | | | TTT |
| 128 | E45SaCas9KKH3 | TCAGGCTTCCCAATTTTTC | 130 | E45SaCas9KKH5 | TGGCATCTGTTTTTGAGGA |
| | | CTG | | | TTG |
| 128 | E45SaCas9KKH3 | TCAGGCTTCCCAATTTTTC | 131 | E45SaCas9KKH6 | AGGATTGCTGAATTATTTC |
| | | CTG | | | TTC |
| 128 | E45SaCas9KKH3 | TCAGGCTTCCCAATTTTTC | 132 | E45SaCas9KKH7 | AATTATTTCTTCCCCAGTT |
| | | CTG | | | GCA |
| 128 | E45SaCas9KKH3 | TCAGGCTTCCCAATTTTTC | 133 | E45SaCas9KKH8 | CAGTTGCATTCAATGTTCT |
| | | CTG | | | GAC |
| 128 | E45SaCas9KKH3 | TCAGGCTTCCCAATTTTTC | 134 | E45SaCas9KKH9 | TTCTGACAACAGTTTGCCG |
| | | CTG | | | CTG |
| 128 | E45SaCas9KKH3 | TCAGGCTTCCCAATTTTTC | 135 | E45SaCas9KKH10 | TTGCCGCTGCCCAATGCCA |
| | | CTG | | | TCC |
| 128 | E45SaCas9KKH3 | TCAGGCTTCCCAATTTTTC | 136 | E45SaCas9KKH16 | AAACAGCTGTCAGACAGAA |
| | | CTG | | | AAA |
| 128 | E45SaCas9KKH3 | TCAGGCTTCCCAATTTTTC | 137 | E45SaCas9KKH17 | GAAGCCTGAATCTGCGGTG |
| | | CTG | | | GCA |
| 128 | E45SaCas9KKH3 | TCAGGCTTCCCAATTTTTC | 138 | E45SaCas9KKH18 | GAAAAATTGGGAAGCCTGA |
| | | CTG | | | ATC |
| 128 | E45SaCas9KKH3 | TCAGGCTTCCCAATTTTTC | 139 | E45SaCas9KKH19 | TCTACAGGAAAAATTGGGA |
| | | CTG | | | AGC |
| 128 | E45SaCas9KKH3 | TCAGGCTTCCCAATTTTTC | 140 | E45SaCas9KKH20 | ACAGATGCCAGTATTCTAC |
| | | CTG | | | AGG |
| 128 | E45SaCas9KKH3 | TCAGGCTTCCCAATTTTTC | 141 | E45SaCas9KKH21 | TCAGCAATCCTCAAAAACA |
| | | CTG | | | GAT |
| 128 | E45SaCas9KKH3 | TCAGGCTTCCCAATTTTTC | 142 | E45SaCas9KKH22 | AATAATTCAGCAATCCTCA |
| | | CTG | | | AAA |
| 128 | E45SaCas9KKH3 | TCAGGCTTCCCAATTTTTC | 143 | E45SaCas9KKH23 | GCAACTGGGGAAGAAATAA |
| | | CTG | | | TTC |
| 128 | E45SaCas9KKH3 | TCAGGCTTCCCAATTTTTC | 144 | E45SaCas9KKH24 | CATTGAATGCAACTGGGGA |
| | | CTG | | | AGA |
| 128 | E45SaCas9KKH3 | TCAGGCTTCCCAATTTTTC | 145 | E45SaCas9KKH25 | GAACATTGAATGCAACTGG |
| | | CTG | | | GGA |
| 128 | E45SaCas9KKH3 | TCAGGCTTCCCAATTTTTC | 146 | E45SaCas9KKH26 | GCGGCAAACTGTTGTCAGA |
| | | CTG | | | ACA |
| 128 | E45SaCas9KKH3 | TCAGGCTTCCCAATTTTTC | 147 | E45SaCas9KKH27 | TTTTGGTATCTTACAGGAA |
| | | CTG | | | CTC |
| 129 | E45SaCas9KKH4 | TAGAATACTGGCATCTGTT | 130 | E45SaCas9KKH5 | TGGCATCTGTTTTTGAGGA |
| | | TTT | | | TTG |
| 129 | E45SaCas9KKH4 | TAGAATACTGGCATCTGTT | 131 | E45SaCas9KKH6 | AGGATTGCTGAATTATTTC |
| | | TTT | | | TTC |
| 129 | E45SaCas9KKH4 | TAGAATACTGGCATCTGTT | 132 | E45SaCas9KKH7 | AATTATTTCTTCCCCAGTT |
| | | TTT | | | GCA |
| 129 | E45SaCas9KKH4 | TAGAATACTGGCATCTGTT | 133 | E45SaCas9KKH8 | CAGTTGCATTCAATGTTCT |
| | | TTT | | | GAC |
| 129 | E45SaCas9KKH4 | TAGAATACTGGCATCTGTT | 134 | E45SaCas9KKH9 | TTCTGACAACAGTTTGCCG |
| | | TTT | | | CTG |
| 129 | E45SaCas9KKH4 | TAGAATACTGGCATCTGTT | 135 | E45SaCas9KKH10 | TTGCCGCTGCCCAATGCCA |
| | | TTT | | | TCC |
| 129 | E45SaCas9KKH4 | TAGAATACTGGCATCTGTT | 136 | E45SaCas9KKH16 | AAACAGCTGTCAGACAGAA |
| | | TTT | | | AAA |
| 129 | E45SaCas9KKH4 | TAGAATACTGGCATCTGTT | 137 | E45SaCas9KKH17 | GAAGCCTGAATCTGCGGTG |
| | | TTT | | | GCA |
| 129 | E45SaCas9KKH4 | TAGAATACTGGCATCTGTT | 138 | E45SaCas9KKH18 | GAAAAATTGGGAAGCCTGA |
| | | TTT | | | ATC |
| 129 | E45SaCas9KKH4 | TAGAATACTGGCATCTGTT | 139 | E45SaCas9KKH19 | TCTACAGGAAAAATTGGGA |
| | | TTT | | | AGC |
| 129 | E45SaCas9KKH4 | TAGAATACTGGCATCTGTT | 140 | E45SaCas9KKH20 | ACAGATGCCAGTATTCTAC |
| | | TTT | | | AGG |
| 129 | E45SaCas9KKH4 | TAGAATACTGGCATCTGTT | 141 | E45SaCas9KKH21 | TCAGCAATCCTCAAAAACA |
| | | TTT | | | GAT |
| 129 | E45SaCas9KKH4 | TAGAATACTGGCATCTGTT | 142 | E45SaCas9KKH2 | AATAATTCAGCAATCCTCA |
| | | TTT | | | AAA |
| 129 | E45SaCas9KKH4 | TAGAATACTGGCATCTGTT | 143 | E45SaCas9KKH23 | GCAACTGGGGAAGAAATAA |
| | | TTT | | | TTC |
| 129 | E45SaCas9KKH4 | TAGAATACTGGCATCTGTT | 144 | E45SaCas9KKH24 | CATTGAATGCAACTGGGGA |
| | | TTT | | | AGA |
| 129 | E45SaCas9KKH4 | TAGAATACTGGCATCTGTT | 145 | E45SaCas9KKH25 | GAACATTGAATGCAACTGG |
| | | TTT | | | GGA |
| 129 | E45SaCas9KKH4 | TAGAATACTGGCATCTGTT | 146 | E45SaCas9KKH26 | GCGGCAAACTGTTGTCAGA |
| | | TTT | | | ACA |
| 129 | E45SaCas9KKH4 | TAGAATACTGGCATCTGTT | 147 | E45SaCas9KKH27 | TTTTGGTATCTTACAGGAA |
| | | TTT | | | CTC |
| 130 | E45SaCas9KKH5 | TGGCATCTGTTTTTGAGGA | 131 | E45SaCas9KKH6 | AGGATTGCTGAATTATTTC |
| | | TTG | | | TTC |
| 130 | E45SaCas9KKH5 | TGGCATCTGTTTTTGAGGA | 132 | E45SaCas9KKH7 | AATTATTTCTTCCCCAGTT |
| | | TTG | | | GCA |
| 130 | E45SaCas9KKH5 | TGGCATCTGTTTTTGAGGA | 133 | E45SaCas9KKH8 | CAGTTGCATTCAATGTTCT |
| | | TTG | | | GAC |
| 130 | E45SaCas9KKH5 | TGGCATCTGTTTTTGAGGA | 134 | E45SaCas9KKH9 | TTCTGACAACAGTTTGCCG |
| | | TTG | | | CTG |
| 130 | E45SaCas9KKH5 | TGGCATCTGTTTTTGAGGA | 135 | E45SaCas9KKH10 | TTGCCGCTGCCCAATGCCA |
| | | TTG | | | TCC |
| 130 | E45SaCas9KKH5 | TGGCATCTGTTTTTGAGGA | 136 | E45SaCas9KKH16 | AAACAGCTGTCAGACAGAA |
| | | TTG | | | AAA |
| 130 | E45SaCas9KKH5 | TGGCATCTGTTTTTGAGGA | 137 | E45SaCas9KKH17 | GAAGCCTGAATCTGCGGTG |
| | | TTG | | | GCA |
| 130 | E45SaCas9KKH5 | TGGCATCTGTTTTTGAGGA | 138 | E45SaCas9KKH18 | GAAAAATTGGGAAGCCTGA |
| | | TTG | | | ATC |
| 130 | E45SaCas9KKH5 | TGGCATCTGTTTTTGAGGA | 139 | E45SaCas9KKH19 | TCTACAGGAAAAATTGGGA |
| | | TTG | | | AGC |
| 130 | E45SaCas9KKH5 | TGGCATCTGTTTTTGAGGA | 140 | E45SaCas9KKH20 | ACAGATGCCAGTATTCTAC |
| | | TTG | | | AGG |
| 130 | E45SaCas9KKH5 | TGGCATCTGTTTTTGAGGA | 141 | E45SaCas9KKH21 | TCAGCAATCCTCAAAAACA |
| | | TTG | | | GAT |
| 130 | E45SaCas9KKH5 | TGGCATCTGTTTTTGAGGA | 142 | E45SaCas9KKH22 | AATAATTCAGCAATCCTCA |
| | | TTG | | | AAA |
| 130 | E45SaCas9KKH5 | TGGCATCTGTTTTTGAGGA | 143 | E45SaCas9KKH23 | GCAACTGGGGAAGAAATAA |
| | | TTG | | | TTC |
| 130 | E45SaCas9KKH5 | TGGCATCTGTTTTTGAGGA | 144 | E45SaCas9KKH24 | CATTGAATGCAACTGGGGA |
| | | TTG | | | AGA |
| 130 | E45SaCas9KKH5 | TGGCATCTGTTTTTGAGGA | 145 | E45SaCas9KKH25 | GAACATTGAATGCAACTGG |
| | | TTG | | | GGA |
| 130 | E45SaCas9KKH5 | TGGCATCTGTTTTTGAGGA | 146 | E45SaCas9KKH26 | GCGGCAAACTGTTGTCAGA |
| | | TTG | | | ACA |
| 130 | E45SaCas9KKH5 | TGGCATCTGTTTTTGAGGA | 147 | E45SaCas9KKH27 | TTTTGGTATCTTACAGGAA |
| | | TTG | | | CTC |
| 131 | E45SaCas9KKH6 | AGGATTGCTGAATTATTTC | 132 | E45SaCas9KKH7 | AATTATTTCTTCCCCAGTT |
| | | TTC | | | GCA |
| 131 | E45SaCas9KKH6 | AGGATTGCTGAATTATTTC | 133 | E45SaCas9KKH8 | CAGTTGCATTCAATGTTCT |
| | | TTC | | | GAC |
| 131 | E45SaCas9KKH6 | AGGATTGCTGAATTATTTC | 134 | E45SaCas9KKH9 | TTCTGACAACAGTTTGCCG |
| | | TTC | | | CTG |
| 131 | E45SaCas9KKH6 | AGGATTGCTGAATTATTTC | 135 | E45SaCas9KKH10 | TTGCCGCTGCCCAATGCCA |
| | | TTC | | | TCC |
| 131 | E45SaCas9KKH6 | AGGATTGCTGAATTATTTC | 136 | E45SaCas9KKH16 | AAACAGCTGTCAGACAGAA |
| | | TTC | | | AAA |
| 131 | E45SaCas9KKH6 | AGGATTGCTGAATTATTTC | 137 | E45SaCas9KKH17 | GAAGCCTGAATCTGCGGTG |
| | | TTC | | | GCA |
| 131 | E45SaCas9KKH6 | AGGATTGCTGAATTATTTC | 138 | E45SaCas9KKH18 | GAAAAATTGGGAAGCCTGA |
| | | TTC | | | ATC |
| 131 | E45SaCas9KKH6 | AGGATTGCTGAATTATTTC | 139 | E45SaCas9KKH19 | TCTACAGGAAAAATTGGGA |
| | | TTC | | | AGC |
| 131 | E45SaCas9KKH6 | AGGATTGCTGAATTATTTC | 140 | E45SaCas9KKH20 | ACAGATGCCAGTATTCTAC |
| | | TTC | | | AGG |
| 131 | E45SaCas9KKH6 | AGGATTGCTGAATTATTTC | 141 | E45SaCas9KKH21 | TCAGCAATCCTCAAAAACA |
| | | TTC | | | GAT |
| 131 | E45SaCas9KKH6 | AGGATTGCTGAATTATTTC | 142 | E45SaCas9KKH22 | AATAATTCAGCAATCCTCA |
| | | TTC | | | AAA |
| 131 | E45SaCas9KKH6 | AGGATTGCTGAATTATTTC | 143 | E45SaCas9KKH23 | GCAACTGGGGAAGAAATAA |
| | | TTC | | | TTC |
| 131 | E45SaCas9KKH6 | AGGATTGCTGAATTATTTC | 144 | E45SaCas9KKH24 | CATTGAATGCAACTGGGGA |
| | | TTC | | | AGA |
| 131 | E45SaCas9KKH6 | AGGATTGCTGAATTATTTC | 145 | E45SaCas9KKH25 | GAACATTGAATGCAACTGG |
| | | TTC | | | GGA |
| 131 | E45SaCas9KKH6 | AGGATTGCTGAATTATTTC | 146 | E45SaCas9KKH26 | GCGGCAAACTGTTGTCAGA |
| | | TTC | | | ACA |
| 131 | E45SaCas9KKH6 | AGGATTGCTGAATTATTTC | 147 | E45SaCas9KKH27 | TTTTGGTATCTTACAGGAA |
| | | TTC | | | CTC |
| 132 | E45SaCas9KKH7 | AATTATTTCTTCCCCAGTT | 133 | E45SaCas9KKH8 | CAGTTGCATTCAATGTTCT |
| | | GCA | | | GAC |
| 132 | E45SaCas9KKH7 | AATTATTTCTTCCCCAGTT | 134 | E45SaCas9KKH9 | TTCTGACAACAGTTTGCCG |
| | | GCA | | | CTG |
| 132 | E45SaCas9KKH7 | AATTATTTCTTCCCCAGTT | 135 | E45SaCas9KKH10 | TTGCCGCTGCCCAATGCCA |
| | | GCA | | | TCC |
| 132 | E45SaCas9KKH7 | AATTATTTCTTCCCCAGTT | 136 | E45SaCas9KKH16 | AAACAGCTGTCAGACAGAA |
| | | GCA | | | AAA |
| 132 | E45SaCas9KKH7 | AATTATTTCTTCCCCAGTT | 137 | E45SaCas9KKH17 | GAAGCCTGAATCTGCGGTG |
| | | GCA | | | GCA |
| 132 | E45SaCas9KKH7 | AATTATTTCTTCCCCAGTT | 138 | E45SaCas9KKH18 | GAAAAATTGGGAAGCCTGA |
| | | GCA | | | ATC |
| 132 | E45SaCas9KKH7 | AATTATTTCTTCCCCAGTT | 139 | E45SaCas9KKH19 | TCTACAGGAAAAATTGGGA |
| | | GCA | | | AGC |
| 132 | E45SaCas9KKH7 | AATTATTTCTTCCCCAGTT | 140 | E45SaCas9KKH20 | ACAGATGCCAGTATTCTAC |
| | | GCA | | | AGG |
| 132 | E45SaCas9KKH7 | AATTATTTCTTCCCCAGTT | 141 | E45SaCas9KKH21 | TCAGCAATCCTCAAAAACA |
| | | GCA | | | GAT |
| 132 | E45SaCas9KKH7 | AATTATTTCTTCCCCAGTT | 142 | E45SaCas9KKH22 | AATAATTCAGCAATCCTCA |
| | | GCA | | | AAA |
| 132 | E45SaCas9KKH7 | AATTATTTCTTCCCCAGTT | 143 | E45SaCas9KKH23 | GCAACTGGGGAAGAAATAA |
| | | GCA | | | TTC |
| 132 | E45SaCas9KKH7 | AATTATTTCTTCCCCAGTT | 144 | E45SaCas9KKH24 | CATTGAATGCAACTGGGGA |
| | | GCA | | | AGA |
| 132 | E45SaCas9KKH7 | AATTATTTCTTCCCCAGTT | 145 | E45SaCas9KKH25 | GAACATTGAATGCAACTGG |
| | | GCA | | | GGA |
| 132 | E45SaCas9KKH7 | AATTATTTCTTCCCCAGTT | 146 | E45SaCas9KKH26 | GCGGCAAACTGTTGTCAGA |
| | | GCA | | | ACA |
| 132 | E45SaCas9KKH7 | AATTATTTCTTCCCCAGTT | 147 | E45SaCas9KKH27 | TTTTGGTATCTTACAGGAA |
| | | GCA | | | CTC |
| 133 | E45SaCas9KKH8 | CAGTTGCATTCAATGTTCT | 134 | E45SaCas9KKH9 | TTCTGACAACAGTTTGCCG |
| | | GAC | | | CTG |
| 133 | E45SaCas9KKH8 | CAGTTGCATTCAATGTTCT | 135 | E45SaCas9KKH10 | TTGCCGCTGCCCAATGCCA |
| | | GAC | | | TCC |
| 133 | E45SaCas9KKH8 | CAGTTGCATTCAATGTTCT | 136 | E45SaCas9KKH16 | AAACAGCTGTCAGACAGAA |
| | | GAC | | | AAA |
| 133 | E45SaCas9KKH8 | CAGTTGCATTCAATGTTCT | 137 | E45SaCas9KKH17 | GAAGCCTGAATCTGCGGTG |
| | | GAC | | | GCA |
| 133 | E45SaCas9KKH8 | CAGTTGCATTCAATGTTCT | 138 | E45SaCas9KKH18 | GAAAAATTGGGAAGCCTGA |
| | | GAC | | | ATC |
| 133 | E45SaCas9KKH8 | CAGTTGCATTCAATGTTCT | 139 | E45SaCas9KKH19 | TCTACAGGAAAAATTGGGA |
| | | GAC | | | AGC |
| 133 | E45SaCas9KKH8 | CAGTTGCATTCAATGTTCT | 140 | E45SaCas9KKH20 | ACAGATGCCAGTATTCTAC |
| | | GAC | | | AGG |
| 133 | E45SaCas9KKH8 | CAGTTGCATTCAATGTTCT | 141 | E45SaCas9KKH21 | TCAGCAATCCTCAAAAACA |
| | | GAC | | | GAT |
| 133 | E45SaCas9KKH8 | CAGTTGCATTCAATGTTCT | 142 | E45SaCas9KKH22 | AATAATTCAGCAATCCTCA |
| | | GAC | | | AAA |
| 133 | E45SaCas9KKH8 | CAGTTGCATTCAATGTTCT | 143 | E45SaCas9KKH23 | GCAACTGGGGAAGAAATAA |
| | | GAC | | | TTC |
| 133 | E45SaCas9KKH8 | CAGTTGCATTCAATGTTCT | 144 | E45SaCas9KKH24 | CATTGAATGCAACTGGGGA |
| | | GAC | | | AGA |
| 133 | E45SaCas9KKH8 | CAGTTGCATTCAATGTTCT | 145 | E45SaCas9KKH25 | GAACATTGAATGCAACTGG |
| | | GAC | | | GGA |
| 133 | E45SaCas9KKH8 | CAGTTGCATTCAATGTTCT | 146 | E45SaCas9KKH26 | GCGGCAAACTGTTGTCAGA |
| | | GAC | | | ACA |
| 133 | E45SaCas9KKH8 | CAGTTGCATTCAATGTTCT | 147 | E45SaCas9KKH27 | TTTTGGTATCTTACAGGAA |
| | | GAC | | | CTC |
| 134 | E45SaCas9KKH9 | TTCTGACAACAGTTTGCCG | 135 | E45SaCas9KKH10 | TTGCCGCTGCCCAATGCCA |
| | | CTG | | | TCC |
| 134 | E45SaCas9KKH9 | TTCTGACAACAGTTTGCCG | 136 | E45SaCas9KKH16 | AAACAGCTGTCAGACAGAA |
| | | CTG | | | AAA |
| 134 | E45SaCas9KKH9 | TTCTGACAACAGTTTGCCG | 137 | E45SaCas9KKH17 | GAAGCCTGAATCTGCGGTG |
| | | CTG | | | GCA |
| 134 | E45SaCas9KKH9 | TTCTGACAACAGTTTGCCG | 138 | E45SaCas9KKH18 | GAAAAATTGGGAAGCCTGA |
| | | CTG | | | ATC |
| 134 | E45SaCas9KKH9 | TTCTGACAACAGTTTGCCG | 139 | E45SaCas9KKH19 | TCTACAGGAAAAATTGGGA |
| | | CTG | | | AGC |
| 134 | E45SaCas9KKH9 | TTCTGACAACAGTTTGCCG | 140 | E45SaCas9KKH20 | ACAGATGCCAGTATTCTAC |
| | | CTG | | | AGG |
| 134 | E45SaCas9KKH9 | TTCTGACAACAGTTTGCCG | 141 | E45SaCas9KKH21 | TCAGCAATCCTCAAAAACA |
| | | CTG | | | GAT |
| 134 | E45SaCas9KKH9 | TTCTGACAACAGTTTGCCG | 142 | E45SaCas9KKH22 | AATAATTCAGCAATC TCA |
| | | CTG | | | AAA |
| 134 | E45SaCas9KKH9 | TTCTGACAACAGTTTGCCG | 143 | E45SaCas9KKH23 | GCAACTGGGGAAGAAATAA |
| | | CTG | | | TTC |
| 134 | E45SaCas9KKH9 | TTCTGACAACAGTTTGCCG | 144 | E45SaCas9KKH24 | CATTGAATGCAACTGGGGA |
| | | CTG | | | AGA |
| 134 | E45SaCas9KKH9 | TTCTGACAACAGTTTGCCG | 145 | E45SaCas9KKH25 | GAACATTGAATGCAACTGG |
| | | CTG | | | GGA |
| 134 | E45SaCas9KKH9 | TTCTGACAACAGTTTGCCG | 146 | E45SaCas9KKH26 | GCGGCAAACTGTTGTCAGA |
| | | CTG | | | ACA |
| 134 | E45SaCas9KKH9 | TTCTGACAACAGTTTGCCG | 147 | E45SaCas9KKH27 | TTTTGGTATCTTACAGGAA |
| | | CTG | | | CTC |
| 135 | E45SaCas9KKH10 | TTGCCGCTGCCCAATGCCA | 136 | E45SaCas9KKH16 | AAACAGCTGTCAGACAGAA |
| | | TCC | | | AAA |
| 135 | E45SaCas9KKH10 | TTGCCGCTGCCCAATGCCA | 137 | E45SaCas9KKH17 | GAAGCCTGAATCTGCGGTG |
| | | TCC | | | GCA |
| 135 | E45SaCas9KKH10 | TTGCCGCTGCCCAATGCCA | 138 | E45SaCas9KKH18 | GAAAAATTGGGAAGCCTGA |
| | | TCC | | | ATC |
| 135 | E45SaCas9KKH10 | TTGCCGCTGCCCAATGCCA | 139 | E45SaCas9KKH19 | TCTACAGGAAAAATTGGGA |
| | | TCC | | | AGC |
| 135 | E45SaCas9KKH10 | TTGCCGCTGCCCAATGCCA | 140 | E45SaCas9KKH20 | ACAGATGCCAGTATTCTAC |
| | | TCC | | | AGG |
| 135 | E45SaCas9KKH10 | TTGCCGCTGCCCAATGCCA | 141 | E45SaCas9KKH21 | TCAGCAATCCTCAAAAACA |
| | | TCC | | | GAT |
| 135 | E45SaCas9KKH10 | TTGCCGCTGCCCAATGCCA | 142 | E45SaCas9KKH22 | AATAATTCAGCAATCCTCA |
| | | TCC | | | AAA |
| 135 | E45SaCas9KKH10 | TTGCCGCTGCCCAATGCCA | 143 | E45SaCas9KKH23 | GCAACTGGGGAAGAAATAA |
| | | TCC | | | TTC |
| 135 | E45SaCas9KKH10 | TTGCCGCTGCCCAATGCCA | 144 | E45SaCas9KKH24 | CATTGAATGCAACTGGGGA |
| | | TCC | | | AGA |
| 135 | E45SaCas9KKH10 | TTGCCGCTGCCCAATGCCA | 145 | E45SaCas9KKH25 | GAACATTGAATGCAACTGG |
| | | TCC | | | GGA |
| 135 | E45SaCas9KKH10 | TTGCCGCTGCCCAATGCCA | 146 | E45SaCas9KKH26 | GCGGCAAACTGTTGTCAGA |
| | | TCC | | | ACA |
| 135 | E45SaCas9KKH10 | TTGCCGCTGCCCAATGCCA | 147 | E45SaCas9KKH27 | TTTTGGTATCTTACAGGAA |
| | | TCC | | | CTC |
| 136 | E45SaCas9KKH16 | AAACAGCTGTCAGACAGAA | 137 | E45SaCas9KKH17 | GAAGCCTGAATCTGCGGTG |
| | | AAA | | | GCA |
| 136 | E45SaCas9KKH16 | AAACAGCTGTCAGACAGAA | 138 | E45SaCas9KKH18 | GAAAAATTGGGAAGCCTGA |
| | | AAA | | | ATC |
| 136 | E45SaCas9KKH16 | AAACAGCTGTCAGACAGAA | 139 | E45SaCas9KKH19 | TCTACAGGAAAAATTGGGA |
| | | AAA | | | AGC |
| 136 | E45SaCas9KKH16 | AAACAGCTGTCAGACAGAA | 140 | E45SaCas9KKH20 | ACAGATGCCAGTATTCTAC |
| | | AAA | | | AGG |
| 136 | E45SaCas9KKH16 | AAACAGCTGTCAGACAGAA | 141 | E45SaCas9KKH21 | TCAGCAATCCTCAAAAACA |
| | | AAA | | | GAT |
| 136 | E45SaCas9KKH16 | AAACAGCTGTCAGACAGAA | 142 | E45SaCas9KKH22 | AATAATTCAGCAATCCTCA |
| | | AAA | | | AAA |
| 136 | E45SaCas9KKH16 | AAACAGCTGTCAGACAGAA | 143 | E45SaCas9KKH23 | GCAACTGGGGAAGAAATAA |
| | | AAA | | | TTC |
| 136 | E45SaCas9KKH16 | AAACAGCTGTCAGACAGAA | 144 | E45SaCas9KKH24 | CATTGAATGCAACTGGGGA |
| | | AAA | | | AGA |
| 136 | E45SaCas9KKH16 | AAACAGCTGTCAGACAGAA | 145 | E45SaCas9KKH25 | GAACATTGAATGCAACTGG |
| | | AAA | | | GGA |
| 136 | E45SaCas9KKH16 | AAACAGCTGTCAGACAGAA | 146 | E45SaCas9KKH26 | GCGGCAAACTGTTGTCAGA |
| | | AAA | | | ACA |
| 136 | E45SaCas9KKH16 | AAACAGCTGTCAGACAGAA | 147 | E45SaCas9KKH27 | TTTTGGTATCTTACAGGAA |
| | | AAA | | | CTC |
| 137 | E45SaCas9KKH17 | GAAGCCTGAATCTGCGGTG | 138 | E45SaCas9KKH18 | GAAAAATTGGGAAGCCTGA |
| | | GCA | | | ATC |
| 137 | E45SaCas9KKH17 | GAAGCCTGAATCTGCGGTG | 139 | E45SaCas9KKH19 | TCTACAGGAAAAATTGGGA |
| | | GCA | | | AGC |
| 137 | E45SaCas9KKH17 | GAAGCCTGAATCTGCGGTG | 140 | E45SaCas9KKH20 | ACAGATGCCAGTATTCTAC |
| | | GCA | | | AGG |
| 137 | E45SaCas9KKH17 | GAAGCCTGAATCTGCGGTG | 141 | E45SaCas9KKH21 | TCAGCAATCCTCAAAAACA |
| | | GCA | | | GAT |
| 137 | E45SaCas9KKH17 | GAAGCCTGAATCTGCGGTG | 142 | E45SaCas9KKH22 | AATAATTCAGCAATCCTCA |
| | | GCA | | | AAA |
| 137 | E45SaCas9KKH17 | GAAGCCTGAATCTGCGGTG | 143 | E45SaCas9KKH23 | GCAACTGGGGAAGAAATAA |
| | | GCA | | | TTC |
| 137 | E45SaCas9KKH17 | GAAGCCTGAATCTGCGGTG | 144 | E45SaCas9KKH24 | CATTGAATGCAACTGGGGA |
| | | GCA | | | AGA |
| 137 | E45SaCas9KKH17 | GAAGCCTGAATCTGCGGTG | 145 | E45SaCas9KKH25 | GAACATTGAATGCAACTGG |
| | | GCA | | | GGA |
| 137 | E45SaCas9KKH17 | GAAGCCTGAATCTGCGGTG | 146 | E45SaCas9KKH26 | GCGGCAAACTGTTGTCAGA |
| | | GCA | | | ACA |
| 137 | E45SaCas9KKH17 | GAAGCCTGAATCTGCGGTG | 147 | E45SaCas9KKH27 | TTTTGGTATCTTACAGGAA |
| | | GCA | | | CTC |
| 138 | E45SaCas9KKH18 | GAAAAATTGGGAAGCCTGA | 139 | E45SaCas9KKH19 | TCTACAGGAAAAATTGGGA |
| | | ATC | | | AGC |
| 138 | E45SaCas9KKH18 | GAAAAATTGGGAAGCCTGA | 140 | E45SaCas9KKH20 | ACAGATGCCAGTATTCTAC |
| | | ATC | | | AGG |
| 138 | E45SaCas9KKH18 | GAAAAATTGGGAAGCCTGA | 141 | E45SaCas9KKH21 | TCAGCAATCCTCAAAAACA |
| | | ATC | | | GAT |
| 138 | E45SaCas9KKH18 | GAAAAATTGGGAAGCCTGA | 142 | E45SaCas9KKH22 | AATAATTCAGCAATCCTCA |
| | | ATC | | | AAA |
| 138 | E45SaCas9KKH18 | GAAAAATTGGGAAGCCTGA | 143 | E45SaCas9KKH23 | GCAACTGGGGAAGAAATAA |
| | | ATC | | | TTC |
| 138 | E45SaCas9KKH18 | GAAAAATTGGGAAGCCTGA | 144 | E45SaCas9KKH24 | CATTGAATGCAACTGGGGA |
| | | ATC | | | AGA |
| 138 | E45SaCas9KKH18 | GAAAAATTGGGAAGCCTGA | 145 | E45SaCas9KKH25 | GAACATTGAATGCAACTGG |
| | | ATC | | | GGA |
| 138 | E45SaCas9KKH18 | GAAAAATTGGGAAGCCTGA | 146 | E45SaCas9KKH26 | GCGGCAAACTGTTGTCAGA |
| | | ATC | | | ACA |
| 138 | E45SaCas9KKH18 | GAAAAATTGGGAAGCCTGA | 147 | E45SaCas9KKH27 | TTTTGGTATCTTACAGGAA |
| | | ATC | | | CTC |
| 139 | E45SaCas9KKH19 | TCTACAGGAAAAATTGGGA | 140 | E45SaCas9KKH20 | ACAGATGCCAGTATTCTAC |
| | | AGC | | | AGG |
| 139 | E45SaCas9KKH19 | TCTACAGGAAAAATTGGGA | 141 | E45SaCas9KKH21 | TCAGCAATCCTCAAAAACA |
| | | AGC | | | GAT |
| 139 | E45SaCas9KKH19 | TCTACAGGAAAAATTGGGA | 142 | E45SaCas9KKH22 | AATAATTCAGCAATCCTCA |
| | | AGC | | | AAA |
| 139 | E45SaCas9KKH19 | TCTACAGGAAAAATTGGGA | 143 | E45SaCas9KKH23 | GCAACTGGGGAAGAAATAA |
| | | AGC | | | TTC |
| 139 | E45SaCas9KKH19 | TCTACAGGAAAAATTGGGA | 144 | E45SaCas9KKH24 | CATTGAATGCAACTGGGGA |
| | | AGC | | | AGA |
| 139 | E45SaCas9KKH19 | TCTACAGGAAAAATTGGGA | 145 | E45SaCas9KKH25 | GAACATTGAATGCAACTGG |
| | | AGC | | | GGA |
| 139 | E45SaCas9KKH19 | TCTACAGGAAAAATTGGGA | 146 | E45SaCas9KKH26 | GCGGCAAACTGTTGTCAGA |
| | | AGC | | | ACA |
| 139 | E45SaCas9KKH19 | TCTACAGGAAAAATTGGGA | 147 | E45SaCas9KKH27 | TTTTGGTATCTTACAGGAA |
| | | AGC | | | CTC |
| 140 | E45SaCas9KKH20 | ACAGATGCCAGTATTCTAC | 141 | E45SaCas9KKH21 | TCAGCAATCCTCAAAAACA |
| | | AGG | | | GAT |
| 140 | E45SaCas9KKH20 | ACAGATGCCAGTATTCTAC | 142 | E45SaCas9KKH22 | AATAATTCAGCAATCCTCA |
| | | AGG | | | AAA |
| 140 | E45SaCas9KKH20 | ACAGATGCCAGTATTCTAC | 143 | E45SaCas9KKH23 | GCAACTGGGGAAGAAATAA |
| | | AGG | | | TTC |
| 140 | E45SaCas9KKH20 | ACAGATGCCAGTATTCTAC | 144 | E45SaCas9KKH24 | CATTGAATGCAACTGGGGA |
| | | AGG | | | AGA |
| 140 | E45SaCas9KKH20 | ACAGATGCCAGTATTCTAC | 145 | E45SaCas9KKH25 | GAACATTGAATGCAACTGG |
| | | AGG | | | GGA |
| 140 | E45SaCas9KKH20 | ACAGATGCCAGTATTCTAC | 146 | E45SaCas9KKH26 | GCGGCAAACTGTTGTCAGA |
| | | AGG | | | ACA |
| 140 | E45SaCas9KKH20 | ACAGATGCCAGTATTCTAC | 147 | E45SaCas9KKH27 | TTTTGGTATCTTACAGGAA |
| | | AGG | | | CTC |
| 141 | E45SaCas9KKH21 | TCAGCAATCCTCAAAAACA | 142 | E45SaCas9KKH22 | AATAATTCAGCAATCCTCA |
| | | GAT | | | AAA |
| 141 | E45SaCas9KKH21 | TCAGCAATCCTCAAAAACA | 143 | E45SaCas9KKH23 | GCAACTGGGGAAGAAATAA |
| | | GAT | | | TTC |
| 141 | E45SaCas9KKH21 | TCAGCAATCCTCAAAAACA | 144 | E45SaCas9KKH24 | CATTGAATGCAACTGGGGA |
| | | GAT | | | AGA |
| 141 | E45SaCas9KKH21 | TCAGCAATCCTCAAAAACA | 145 | E45SaCas9KKH25 | GAACATTGAATGCAACTGG |
| | | GAT | | | GGA |
| 141 | E45SaCas9KKH21 | TCAGCAATCCTCAAAAACA | 146 | E45SaCas9KKH26 | GCGGCAAACTGTTGTCAGA |
| | | GAT | | | ACA |
| 141 | E45SaCas9KKH21 | TCAGCAATCCTCAAAAACA | 147 | E45SaCas9KKH27 | TTTTGGTATCTTACAGGAA |
| | | GAT | | | CTC |
| 142 | E45SaCas9KKH22 | AATAATTCAGCAATCCTCA | 143 | E45SaCas9KKH23 | GCAACTGGGGAAGAAATAA |
| | | AAA | | | TTC |
| 142 | E45SaCas9KKH22 | AATAATTCAGCAATCCTCA | 144 | E45SaCas9KKH24 | CATTGAATGCAACTGG GA |
| | | AAA | | | AGA |
| 142 | E45SaCas9KKH22 | AATAATTCAGCAATCCTCA | 145 | E45SaCas9KKH25 | GAACATTGAATGCAACTGG |
| | | AAA | | | GGA |
| 142 | E45SaCas9KKH22 | AATAATTCAGCAATCCTCA | 146 | E45SaCas9KKH26 | GCGGCAAACTGTTGTCAGA |
| | | AAA | | | ACA |
| 142 | E45SaCas9KKH22 | AATAATTCAGCAATCCTCA | 147 | E45SaCas9KKH27 | TTTTGGTATCTTACAGGAA |
| | | AAA | | | CTC |
| 143 | E45SaCas9KKH23 | GCAACTGGGGAAGAAATAA | 144 | E45SaCas9KKH24 | CATTGAATGCAACTGGGGA |
| | | TTC | | | AGA |
| 143 | E45SaCas9KKH23 | GCAACTGGGGAAGAAATAA | 145 | E45SaCas9KKH25 | GAACATTGAATGCAACTGG |
| | | TTC | | | GGA |
| 143 | E45SaCas9KKH23 | GCAACTGGGGAAGAAATAA | 146 | E45SaCas9KKH26 | GCGGCAAACTGTTGTCAGA |
| | | TTC | | | ACA |
| 143 | E45SaCas9KKH23 | GCAACTGGGGAAGAAATAA | 147 | E45SaCas9KKH27 | TTTTGGTATCTTACAGGAA |
| | | TTC | | | CTC |
| 144 | E45SaCas9KKH24 | CATTGAATGCAACTGGGGA | 145 | E45SaCas9KKH25 | GAACATTGAATGCAACTGG |
| | | AGA | | | GGA |
| 144 | E45SaCas9KKH24 | CATTGAATGCAACTGGGGA | 146 | E45SaCas9KKH26 | GCGGCAAACTGTTGTCAGA |
| | | AGA | | | ACA |
| 144 | E45SaCas9KKH24 | CATTGAATGCAACTGGGGA | 147 | E45SaCas9KKH27 | TTTTGGTATCTTACAGGAA |
| | | AGA | | | CTC |
| 145 | E45SaCas9KKH25 | GAACATTGAATGCAACTGG | 146 | E45SaCas9KKH26 | GCGGCAAACTGTTGTCAGA |
| | | GGA | | | ACA |
| 145 | E45SaCas9KKH25 | GAACATTGAATGCAACTGG | 147 | E45SaCas9KKH27 | TTTTGGTATCTTACAGGAA |
| | | GGA | | | CTC |
| 146 | E45SaCas9KKH26 | GCGGCAAACTGTTGTCAGA | 147 | E45SaCas9KKH27 | TTTTGGTATCTTACAGGAA |
| | | ACA | | | CTC |

TABLE 2C
(3) Exon 45 SluCas9 guides:

| Seq | | |
|---|---|---|
| ID | Guide ID or Guide | |
| No. | RNA Name | Guide Sequence |
| 209 | E45Slu1 | AGACCTCCTGCCACCGCAGATT |
| 210 | E45Slu2 | TCCCAATTTTTCCTGTAGAATA |
| 211 | E45Slu3 | TAGAATACTGGCATCTGTTTTT |
| 212 | E45Slu4 | TTTGCCGCTGCCCAATGCCATC |
| 213 | E45Slu7 | CTGTCAGACAGAAAAAAGAGGT |
| 214 | E45Slu8 | GCTGTCAGACAGAAAAAAGAGG |
| 215 | E45Slu9 | AACAGCTGTCAGACAGAAAAAA |
| 216 | E45Slu10 | AAGCCTGAATCTGCGGTGGCAG |
| 217 | E45Slu11 | GGGAAGCCTGAATCTGCGGTGG |
| 218 | E45Slu12 | AATTGGGAAGCCTGAATCTGCG |
| 219 | E45Slu13 | AAAAATTGGGAAGCCTGAATCT |
| 220 | E45Slu14 | GCCAGTATTCTACAGGAAAAAT |
| 221 | E45Slu15 | TGCCAGTATTCTACAGGAAAAA |
| 222 | E45Slu16 | AAAAACAGATGCCAGTATTCTA |
| 223 | E45Slu17 | TGTCAGAACATTGAATGCAACT |
| 224 | E45Slu18 | TTGTCAGAACATTGAATGCAAC |
| 225 | E45Slu19 | GTTGTCAGAACATTGAATGCAA |
| 226 | E45Slu20 | AACTCCAGGATGGCATTGGGCA |
| 227 | E45Slu21 | TACAGGAACTCCAGGATGGCAT |
| 228 | E45Slu22 | TTACAGGAACTCCAGGATGGCA |
| 229 | E45Slu23 | GGTATCTTACAGGAACTCCAGG |
| 230 | E45Slu24 | TTTTGGTATCTTACAGGAACTC |

TABLE 2D
(4) Exon 45 SluCas9 pairs:

| Guide 1 Seq ID No. | Guide 1 | Guide 1 Sequence | Guide 2 Seq ID No. | Guide 2 | Guide 2 Sequence |
|---|---|---|---|---|---|
| 209 | E45SL1 | AGACCTCCTGCCACCGCAGATT | 210 | E45SL2 | TCCCAATTTTTCCTGTAGAATA |
| 209 | E45SL1 | AGACCTCCTGCCACCGCAGATT | 211 | E45SL3 | TAGAATACTGGCATCTGTTTTT |
| 209 | E45SL1 | AGACCTCCTGCCACCGCAGATT | 212 | E45SL4 | TTTGCCGCTGCCCAATGCCATC |
| 209 | E45SL1 | AGACCTCCTGCCACCGCAGATT | 213 | E45SL7 | CTGTCAGACAGAAAAAAGAGGT |
| 209 | E45SL1 | AGACCTCCTGCCACCGCAGATT | 214 | E45SL8 | GCTGTCAGACAGAAAAAAGAGG |
| 209 | E45SL1 | AGACCTCCTGCCACCGCAGATT | 215 | E45SL9 | AACAGCTGTCAGACAGAAAAAA |
| 209 | E45SL1 | AGACCTCCTGCCACCGCAGATT | 216 | E45SL10 | AAGCCTGAATCTGCGGTGGCAG |
| 209 | E45SL1 | AGACCTCCTGCCACCGCAGATT | 217 | E45SL11 | GGGAAGCCTGAATCTGCGGTGG |
| 209 | E45SL1 | AGACCTCCTGCCACCGCAGATT | 218 | E45SL12 | AATTGGGAAGCCTGAATCTGCG |
| 209 | E45SL1 | AGACCTCCTGCCACCGCAGATT | 219 | E45SL13 | AAAAATTGGGAAGCCTGAATCT |
| 209 | E45SL1 | AGACCTCCTGCCACCGCAGATT | 220 | E45SL14 | GCCAGTATTCTACAGGAAAAAT |
| 209 | E45SL1 | AGACCTCCTGCCACCGCAGATT | 221 | E45SL15 | TGCCAGTATTCTACAGGAAAAA |
| 209 | E45SL1 | AGACCTCCTGCCACCGCAGATT | 222 | E45SL16 | AAAAACAGATGCCAGTATTCTA |
| 209 | E45SL1 | AGACCTCCTGCCACCGCAGATT | 223 | E45SL17 | TGTCAGAACATTGAATGCAACT |
| 209 | E45SL1 | AGACCTCCTGCCACCGCAGATT | 224 | E45SL18 | TTGTCAGAACATTGAATGCAAC |
| 209 | E45SL1 | AGACCTCCTGCCACCGCAGATT | 225 | E45SL19 | GTTGTCAGAACATTGAATGCAA |
| 209 | E45SL1 | AGACCTCCTGCCACCGCAGATT | 226 | E45SL20 | AACTCCAGGATGGCATTGGGCA |
| 209 | E45SL1 | AGACCTCCTGCCACCGCAGATT | 227 | E45SL21 | TACAGGAACTCCAGGATGGCAT |
| 209 | E45SL1 | AGACCTCCTGCCACCGCAGATT | 228 | E45SL22 | TTACAGGAACTCCAGGATGGCA |
| 209 | E45SL1 | AGACCTCCTGCCACCGCAGATT | 229 | E45SL23 | GGTATCTTACAGGAACTCCAGG |
| 209 | E45SL1 | AGACCTCCTGCCACCGCAGATT | 230 | E45SL24 | TTTTGGTATCTTACAGGAACTC |
| 210 | E45SL2 | TCCCAATTTTTCCTGTAGAATA | 211 | E45SL3 | TAGAATACTGGCATCTGTTTTT |
| 210 | E45SL2 | TCCCAATTTTTCCTGTAGAATA | 212 | E45SL4 | TTTGCCGCTGCCCAATGCCATC |
| 210 | E45SL2 | TCCCAATTTTTCCTGTAGAATA | 213 | E45SL7 | CTGTCAGACAGAAAAAAGAGGT |
| 210 | E45SL2 | TCCCAATTTTTCCTGTAGAATA | 214 | E45SL8 | GCTGTCAGACAGAAAAAAGAGG |
| 210 | E45SL2 | TCCCAATTTTTCCTGTAGAATA | 215 | E45SL9 | AACAGCTGTCAGACAGAAAAAA |
| 210 | E45SL2 | TCCCAATTTTTCCTGTAGAATA | 216 | E45SL10 | AAGCCTGAATCTGCGGTGGCAG |
| 210 | E45SL2 | TCCCAATTTTTCCTGTAGAATA | 217 | E45SL11 | GGGAAGCCTGAATCTGCGGTGG |
| 210 | E45SL2 | TCCCAATTTTTCCTGTAGAATA | 218 | E45SL12 | AATTGGGAAGCCTGAATCTGCG |
| 210 | E45SL2 | TCCCAATTTTTCCTGTAGAATA | 219 | E45SL13 | AAAAATTGGGAAGCCTGAATCT |
| 210 | E45SL2 | TCCCAATTTTTCCTGTAGAATA | 220 | E45SL14 | GCCAGTATTCTACAGGAAAAAT |
| 210 | E45SL2 | TCCCAATTTTTCCTGTAGAATA | 221 | E45SL15 | TGCCAGTATTCTACAGGAAAAA |
| 210 | E45SL2 | TCCCAATTTTTCCTGTAGAATA | 222 | E45SL16 | AAAAACAGATGCCAGTATTCTA |
| 210 | E45SL2 | TCCCAATTTTTCCTGTAGAATA | 223 | E45SL17 | TGTCAGAACATTGAATGCAACT |
| 210 | E45SL2 | TCCCAATTTTTCCTGTAGAATA | 224 | E45SL18 | TTGTCAGAACATTGAATGCAAC |
| 210 | E45SL2 | TCCCAATTTTTCCTGTAGAATA | 225 | E45SL19 | GTTGTCAGAACATTGAATGCAA |
| 210 | E45SL2 | TCCCAATTTTTCCTGTAGAATA | 226 | E45SL20 | AACTCCAGGATGGCATTGGGCA |
| 210 | E45SL2 | TCCCAATTTTTCCTGTAGAATA | 227 | E45SL21 | TACAGGAACTCCAGGATGGCAT |
| 210 | E45SL2 | TCCCAATTTTTCCTGTAGAATA | 228 | E45SL22 | TTACAGGAACTCCAGGATGGCA |
| 210 | E45SL2 | TCCCAATTTTTCCTGTAGAATA | 229 | E45SL23 | GGTATCTTACAGGAACTCCAGG |
| 210 | E45SL2 | TCCCAATTTTTCCTGTAGAATA | 230 | E45SL24 | TTTTGGTATCTTACAGGAACTC |
| 211 | E45SL3 | TAGAATACTGGCATCTGTTTTT | 212 | E45SL4 | TTTGCCGCTGCCCAATGCCATC |
| 211 | E45SL3 | TAGAATACTGGCATCTGTTTTT | 213 | E45SL7 | CTGTCAGACAGAAAAAAGAGGT |
| 211 | E45SL3 | TAGAATACTGGCATCTGTTTTT | 214 | E45SL8 | GCTGTCAGACAGAAAAAAGAGG |
| 211 | E45SL3 | TAGAATACTGGCATCTGTTTTT | 215 | E45SL9 | AACAGCTGTCAGACAGAAAAAA |
| 211 | E45SL3 | TAGAATACTGGCATCTGTTTTT | 216 | E45SL10 | AAGCCTGAATCTGCGGTGGCAG |
| 211 | E45SL3 | TAGAATACTGGCATCTGTTTTT | 217 | E45SL11 | GGGAAGCCTGAATCTGCGGTGG |
| 211 | E45SL3 | TAGAATACTGGCATCTGTTTTT | 218 | E45SL12 | AATTGGGAAGCCTGAATCTGCG |
| 211 | E45SL3 | TAGAATACTGGCATCTGTTTTT | 219 | E45SL13 | AAAAATTGGGAAGCCTGAATCT |
| 211 | E45SL3 | TAGAATACTGGCATCTGTTTTT | 220 | E45SL14 | GCCAGTATTCTACAGGAAAAAT |
| 211 | E45SL3 | TAGAATACTGGCATCTGTTTTT | 221 | E45SL15 | TGCCAGTATTCTACAGGAAAAA |
| 211 | E45SL3 | TAGAATACTGGCATCTGTTTTT | 222 | E45SL16 | AAAAACAGATGCCAGTATTCTA |
| 211 | E45SL3 | TAGAATACTGGCATCTGTTTTT | 223 | E45SL17 | TGTCAGAACATTGAATGCAACT |
| 211 | E45SL3 | TAGAATACTGGCATCTGTTTTT | 224 | E45SL18 | TTGTCAGAACATTGAATGCAAC |
| 211 | E45SL3 | TAGAATACTGGCATCTGTTTTT | 225 | E45SL19 | GTTGTCAGAACATTGAATGCAA |
| 211 | E45SL3 | TAGAATACTGGCATCTGTTTTT | 226 | E45SL20 | AACTCCAGGATGGCATTGGGCA |
| 211 | E45SL3 | TAGAATACTGGCATCTGTTTTT | 227 | E45SL21 | TACAGGAACTCCAGGATGGCAT |
| 211 | E45SL3 | TAGAATACTGGCATCTGTTTTT | 228 | E45SL22 | TTACAGGAACTCCAGGATGGCA |
| 211 | E45SL3 | TAGAATACTGGCATCTGTTTTT | 229 | E45SL23 | GGTATCTTACAGGAACTCCAGG |
| 211 | E45SL3 | TAGAATACTGGCATCTGTTTTT | 230 | E45SL24 | TTTTGGTATCTTACAGGAACTC |
| 212 | E45SL4 | TTTGCCGCTGCCCAATGCCATC | 213 | E45SL7 | CTGTCAGACAGAAAAAAGAGGT |
| 212 | E45SL4 | TTTGCCGCTGCCCAATGCCATC | 214 | E45SL8 | GCTGTCAGACAGAAAAAAGAGG |
| 212 | E45SL4 | TTTGCCGCTGCCCAATGCCATC | 215 | E45SL9 | AACAGCTGTCAGACAGAAAAAA |
| 212 | E45SL4 | TTTGCCGCTGCCCAATGCCATC | 216 | E45SL10 | AAGCCTGAATCTGCGGTGGCAG |
| 212 | E45SL4 | TTTGCCGCTGCCCAATGCCATC | 217 | E45SL11 | GGGAAGCCTGAATCTGCGGTGG |
| 212 | E45SL4 | TTTGCCGCTGCCCAATGCCATC | 218 | E45SL12 | AATTGGGAAGCCTGAATCTGCG |
| 212 | E45SL4 | TTTGCCGCTGCCCAATGCCATC | 219 | E45SL13 | AAAAATTGGGAAGCCTGAATCT |
| 212 | E45SL4 | TTTGCCGCTGCCCAATGCCATC | 220 | E45SL14 | GCCAGTATTCTACAGGAAAAAT |
| 212 | E45SL4 | TTTGCCGCTGCCCAATGCCATC | 221 | E45SL15 | TGCCAGTATTCTACAGGAAAAA |
| 212 | E45SL4 | TTTGCCGCTGCCCAATGCCATC | 222 | E45SL16 | AAAAACAGATGCCAGTATTCTA |
| 212 | E45SL4 | TTTGCCGCTGCCCAATGCCATC | 223 | E45SL17 | TGTCAGAACATTGAATGCAACT |
| 212 | E45SL4 | TTTGCCGCTGCCCAATGCCATC | 224 | E45SL18 | TTGTCAGAACATTGAATGCAAC |
| 212 | E45SL4 | TTTGCCGCTGCCCAATGCCATC | 225 | E45SL19 | GTTGTCAGAACATTGAATGCAA |
| 212 | E45SL4 | TTTGCCGCTGCCCAATGCCATC | 226 | E45SL20 | AACTCCAGGATGGCATTGGGCA |
| 212 | E45SL4 | TTTGCCGCTGCCCAATGCCATC | 227 | E45SL21 | TACAGGAACTCCAGGATGGCAT |
| 212 | E45SL4 | TTTGCCGCTGCCCAATGCCATC | 228 | E45SL22 | TTACAGGAACTCCAGGATGGCA |
| 212 | E45SL4 | TTTGCCGCTGCCCAATGCCATC | 229 | E45SL23 | GGTATCTTACAGGAACTCCAGG |
| 212 | E45SL4 | TTTGCCGCTGCCCAATGCCATC | 230 | E45SL24 | TTTTGGTATCTTACAGGAACTC |
| 213 | E45SL7 | CTGTCAGACAGAAAAAAGAGGT | 214 | E45SL8 | GCTGTCAGACAGAAAAAAGAGG |
| 213 | E45SL7 | CTGTCAGACAGAAAAAAGAGGT | 215 | E45SL9 | AACAGCTGTCAGACAGAAAAAA |
| 213 | E45SL7 | CTGTCAGACAGAAAAAAGAGGT | 216 | E45SL10 | AAGCCTGAATCTGCGGTGGCAG |
| 213 | E45SL7 | CTGTCAGACAGAAAAAAGAGGT | 217 | E45SL11 | GGGAAGCCTGAATCTGCGGTGG |
| 213 | E45SL7 | CTGTCAGACAGAAAAAAGAGGT | 218 | E45SL12 | AATTGGGAAGCCTGAATCTGCG |
| 213 | E45SL7 | CTGTCAGACAGAAAAAAGAGGT | 219 | E45SL13 | AAAAATTGGGAAGCCTGAATCT |
| 213 | E45SL7 | CTGTCAGACAGAAAAAAGAGGT | 220 | E45SL14 | GCCAGTATTCTACAGGAAAAAT |
| 213 | E45SL7 | CTGTCAGACAGAAAAAAGAGGT | 221 | E45SL15 | TGCCAGTATTCTACAGGAAAAA |
| 213 | E45SL7 | CTGTCAGACAGAAAAAAGAGGT | 222 | E45SL16 | AAAAACAGATGCCAGTATTCTA |
| 213 | E45SL7 | CTGTCAGACAGAAAAAAGAGGT | 223 | E45SL17 | TGTCAGAACATTGAATGCAACT |
| 213 | E45SL7 | CTGTCAGACAGAAAAAAGAGGT | 224 | E45SL18 | TTGTCAGAACATTGAATGCAAC |
| 213 | E45SL7 | CTGTCAGACAGAAAAAAGAGGT | 225 | E45SL19 | GTTGTCAGAACATTGAATGCAA |
| 213 | E45SL7 | CTGTCAGACAGAAAAAAGAGGT | 226 | E45SL20 | AACTCCAGGATGGCATTGGGCA |
| 213 | E45SL7 | CTGTCAGACAGAAAAAAGAGGT | 227 | E45SL21 | TACAGGAACTCCAGGATGGCAT |
| 213 | E45SL7 | CTGTCAGACAGAAAAAAGAGGT | 228 | E45SL22 | TTACAGGAACTCCAGGATGGCA |
| 213 | E45SL7 | CTGTCAGACAGAAAAAAGAGGT | 229 | E45SL23 | GGTATCTTACAGGAACTCCAGG |
| 213 | E45SL7 | CTGTCAGACAGAAAAAAGAGGT | 230 | E45SL24 | TTTTGGTATCTTACAGGAACTC |
| 214 | E45SL8 | GCTGTCAGACAGAAAAAAGAGG | 215 | E45SL9 | AACAGCTGTCAGACAGAAAAAA |
| 214 | E45SL8 | GCTGTCAGACAGAAAAAAGAGG | 216 | E45SL10 | AAGCCTGAATCTGCGGTGGCAG |
| 214 | E45SL8 | GCTGTCAGACAGAAAAAAGAGG | 217 | E45SL11 | GGGAAGCCTGAATCTGCGGTGG |
| 214 | E45SL8 | GCTGTCAGACAGAAAAAAGAGG | 218 | E45SL12 | AATTGGGAAGCCTGAATCTGCG |
| 214 | E45SL8 | GCTGTCAGACAGAAAAAAGAGG | 219 | E45SL13 | AAAAATTGGGAAGCCTGAATCT |
| 214 | E45SL8 | GCTGTCAGACAGAAAAAAGAGG | 220 | E45SL14 | GCCAGTATTCTACAGGAAAAAT |
| 214 | E45SL8 | GCTGTCAGACAGAAAAAAGAGG | 221 | E45SL15 | TGCCAGTATTCTACAGGAAAAA |
| 214 | E45SL8 | GCTGTCAGACAGAAAAAAGAGG | 222 | E45SL16 | AAAAACAGATGCCAGTATTCTA |
| 214 | E45SL8 | GCTGTCAGACAGAAAAAAGAGG | 223 | E45SL17 | TGTCAGAACATTGAATGCAACT |
| 214 | E45SL8 | GCTGTCAGACAGAAAAAAGAGG | 224 | E45SL18 | TTGTCAGAACATTGAATGCAAC |
| 214 | E45SL8 | GCTGTCAGACAGAAAAAAGAGG | 225 | E45SL19 | GTTGTCAGAACATTGAATGCAA |
| 214 | E45SL8 | GCTGTCAGACAGAAAAAAGAGG | 226 | E45SL20 | AACTCCAGGATGGCATTGGGCA |
| 214 | E45SL8 | GCTGTCAGACAGAAAAAAGAGG | 227 | E45SL21 | TACAGGAACTCCAGGATGGCAT |
| 214 | E45SL8 | GCTGTCAGACAGAAAAAAGAGG | 228 | E45SL22 | TTACAGGAACTCCAGGATGGCA |
| 214 | E45SL8 | GCTGTCAGACAGAAAAAAGAGG | 229 | E45SL23 | GGTATCTTACAGGAACTCCAGG |
| 214 | E45SL8 | GCTGTCAGACAGAAAAAAGAGG | 230 | E45SL24 | TTTTGGTATCTTACAGGAACTC |
| 215 | E45SL9 | AACAGCTGTCAGACAGAAAAAA | 216 | E45SL10 | AAGCCTGAATCTGCGGTGGCAG |
| 215 | E45SL9 | AACAGCTGTCAGACAGAAAAAA | 217 | E45SL11 | GGGAAGCCTGAATCTGCGGTGG |
| 215 | E45SL9 | AACAGCTGTCAGACAGAAAAAA | 218 | E45SL12 | AATTGGGAAGCCTGAATCTGCG |
| 215 | E45SL9 | AACAGCTGTCAGACAGAAAAAA | 219 | E45SL13 | AAAAATTGGGAAGCCTGAATCT |
| 215 | E45SL9 | AACAGCTGTCAGACAGAAAAAA | 220 | E45SL14 | GCCAGTATTCTACAGGAAAAAT |
| 215 | E45SL9 | AACAGCTGTCAGACAGAAAAAA | 221 | E45SL15 | TGCCAGTATTCTACAGGAAAAA |
| 215 | E45SL9 | AACAGCTGTCAGACAGAAAAAA | 222 | E45SL16 | AAAAACAGATGCCAGTATTCTA |
| 215 | E45SL9 | AACAGCTGTCAGACAGAAAAAA | 223 | E45SL17 | TGTCAGAACATTGAATGCAACT |
| 215 | E45SL9 | AACAGCTGTCAGACAGAAAAAA | 224 | E45SL18 | TTGTCAGAACATTGAATGCAAC |
| 215 | E45SL9 | AACAGCTGTCAGACAGAAAAAA | 225 | E45SL19 | GTTGTCAGAACATTGAATGCAA |
| 215 | E45SL9 | AACAGCTGTCAGACAGAAAAAA | 226 | E45SL20 | AACTCCAGGATGGCATTGGGCA |
| 215 | E45SL9 | AACAGCTGTCAGACAGAAAAAA | 227 | E45SL21 | TACAGGAACTCCAGGATGGCAT |
| 215 | E45SL9 | AACAGCTGTCAGACAGAAAAAA | 228 | E45SL22 | TTACAGGAACTCCAGGATGGCA |
| 215 | E45SL9 | AACAGCTGTCAGACAGAAAAAA | 229 | E45SL23 | GGTATCTTACAGGAACTCCAGG |
| 215 | E45SL9 | AACAGCTGTCAGACAGAAAAAA | 230 | E45SL24 | TTTTGGTATCTTACAGGAACTC |
| 216 | E45SL10 | AAGCCTGAATCTGCGGTGGCAG | 217 | E45SL11 | GGGAAGCCTGAATCTGCGGTGG |
| 216 | E45SL10 | AAGCCTGAATCTGCGGTGGCAG | 218 | E45SL12 | AATTGGGAAGCCTGAATCTGCG |
| 216 | E45SL10 | AAGCCTGAATCTGCGGTGGCAG | 219 | E45SL13 | AAAAATTGGGAAGCCTGAATCT |
| 216 | E45SL10 | AAGCCTGAATCTGCGGTGGCAG | 220 | E45SL14 | GCCAGTATTCTACAGGAAAAAT |
| 216 | E45SL10 | AAGCCTGAATCTGCGGTGGCAG | 221 | E45SL15 | TGCCAGTATTCTACAGGAAAAA |
| 216 | E45SL10 | AAGCCTGAATCTGCGGTGGCAG | 222 | E45SL16 | AAAAACAGATGCCAGTATTCTA |
| 216 | E45SL10 | AAGCCTGAATCTGCGGTGGCAG | 223 | E45SL17 | TGTCAGAACATTGAATGCAACT |
| 216 | E45SL10 | AAGCCTGAATCTGCGGTGGCAG | 224 | E45SL18 | TTGTCAGAACATTGAATGCAAC |
| 216 | E45SL10 | AAGCCTGAATCTGCGGTGGCAG | 225 | E45SL19 | GTTGTCAGAACATTGAATGCAA |
| 216 | E45SL10 | AAGCCTGAATCTGCGGTGGCAG | 226 | E45SL20 | AACTCCAGGATGGCATTGGGCA |
| 216 | E45SL10 | AAGCCTGAATCTGCGGTGGCAG | 227 | E45SL21 | TACAGGAACTCCAGGATGGCAT |
| 216 | E45SL10 | AAGCCTGAATCTGCGGTGGCAG | 228 | E45SL22 | TTACAGGAACTCCAGGATGGCA |
| 216 | E45SL10 | AAGCCTGAATCTGCGGTGGCAG | 229 | E45SL23 | GGTATCTTACAGGAACTCCAGG |
| 216 | E45SL10 | AAGCCTGAATCTGCGGTGGCAG | 230 | E45SL24 | TTTTGGTATCTTACAGGAACTC |
| 217 | E45SL11 | GGGAAGCCTGAATCTGCGGTGG | 218 | E45SL12 | AATTGGGAAGCCTGAATCTGCG |
| 217 | E45SL11 | GGGAAGCCTGAATCTGCGGTGG | 219 | E45SL13 | AAAAATTGGGAAGCCTGAATCT |
| 217 | E45SL11 | GGGAAGCCTGAATCTGCGGTGG | 220 | E45SL14 | GCCAGTATTCTACAGGAAAAAT |
| 217 | E45SL11 | GGGAAGCCTGAATCTGCGGTGG | 221 | E45SL15 | TGCCAGTATTCTACAGGAAAAA |
| 217 | E45SL11 | GGGAAGCCTGAATCTGCGGTGG | 222 | E45SL16 | AAAAACAGATGCCAGTATTCTA |
| 217 | E45SL11 | GGGAAGCCTGAATCTGCGGTGG | 223 | E45SL17 | TGTCAGAACATTGAATGCAACT |
| 217 | E45SL11 | GGGAAGCCTGAATCTGCGGTGG | 224 | E45SL18 | TTGTCAGAACATTGAATGCAAC |
| 217 | E45SL11 | GGGAAGCCTGAATCTGCGGTGG | 225 | E45SL19 | GTTGTCAGAACATTGAATGCAA |
| 217 | E45SL11 | GGGAAGCCTGAATCTGCGGTGG | 226 | E45SL20 | AACTCCAGGATGGCATTGGGCA |
| 217 | E45SL11 | GGGAAGCCTGAATCTGCGGTGG | 227 | E45SL21 | TACAGGAACTCCAGGATGGCAT |
| 217 | E45SL11 | GGGAAGCCTGAATCTGCGGTGG | 228 | E45SL22 | TTACAGGAACTCCAGGATGGCA |
| 217 | E45SL11 | GGGAAGCCTGAATCTGCGGTGG | 229 | E45SL23 | GGTATCTTACAGGAACTCCAGG |
| 217 | E45SL11 | GGGAAGCCTGAATCTGCGGTGG | 230 | E45SL24 | TTTTGGTATCTTACAGGAACTC |
| 218 | E45SL12 | AATTGGGAAGCCTGAATCTGCG | 219 | E45SL13 | AAAAATTGGGAAGCCTGAATCT |
| 218 | E45SL12 | AATTGGGAAGCCTGAATCTGCG | 220 | E45SL14 | GCCAGTATTCTACAGGAAAAAT |
| 218 | E45SL12 | AATTGGGAAGCCTGAATCTGCG | 221 | E45SL15 | TGCCAGTATTCTACAGGAAAAA |
| 218 | E45SL12 | AATTGGGAAGCCTGAATCTGCG | 222 | E45SL16 | AAAAACAGATGCCAGTATTCTA |
| 218 | E45SL12 | AATTGGGAAGCCTGAATCTGCG | 223 | E45SL17 | TGTCAGAACATTGAATGCAACT |
| 218 | E45SL12 | AATTGGGAAGCCTGAATCTGCG | 224 | E45SL18 | TTGTCAGAACATTGAATGCAAC |
| 218 | E45SL12 | AATTGGGAAGCCTGAATCTGCG | 225 | E45SL19 | GTTGTCAGAACATTGAATGCAA |
| 218 | E45SL12 | AATTGGGAAGCCTGAATCTGCG | 226 | E45SL20 | AACTCCAGGATGGCATTGGGCA |
| 218 | E45SL12 | AATTGGGAAGCCTGAATCTGCG | 227 | E45SL21 | TACAGGAACTCCAGGATGGCAT |
| 218 | E45SL12 | AATTGGGAAGCCTGAATCTGCG | 228 | E45SL22 | TTACAGGAACTCCAGGATGGCA |
| 218 | E45SL12 | AATTGGGAAGCCTGAATCTGCG | 229 | E45SL23 | GGTATCTTACAGGAACTCCAGG |
| 218 | E45SL12 | AATTGGGAAGCCTGAATCTGCG | 230 | E45SL24 | TTTTGGTATCTTACAGGAACTC |
| 219 | E45SL13 | AAAAATTGGGAAGCCTGAATCT | 220 | E45SL14 | GCCAGTATTCTACAGGAAAAAT |
| 219 | E45SL13 | AAAAATTGGGAAGCCTGAATCT | 221 | E45SL15 | TGCCAGTATTCTACAGGAAAAA |
| 219 | E45SL13 | AAAAATTGGGAAGCCTGAATCT | 222 | E45SL16 | AAAAACAGATGCCAGTATTCTA |
| 219 | E45SL13 | AAAAATTGGGAAGCCTGAATCT | 223 | E45SL17 | TGTCAGAACATTGAATGCAACT |
| 219 | E45SL13 | AAAAATTGGGAAGCCTGAATCT | 224 | E45SL18 | TTGTCAGAACATTGAATGCAAC |
| 219 | E45SL13 | AAAAATTGGGAAGCCTGAATCT | 225 | E45SL19 | GTTGTCAGAACATTGAATGCAA |
| 219 | E45SL13 | AAAAATTGGGAAGCCTGAATCT | 226 | E45SL20 | AACTCCAGGATGGCATTGGGCA |
| 219 | E45SL13 | AAAAATTGGGAAGCCTGAATCT | 227 | E45SL21 | TACAGGAACTCCAGGATGGCAT |
| 219 | E45SL13 | AAAAATTGGGAAGCCTGAATCT | 228 | E45SL22 | TTACAGGAACTCCAGGATGGCA |
| 219 | E45SL13 | AAAAATTGGGAAGCCTGAATCT | 229 | E45SL23 | GGTATCTTACAGGAACTCCAGG |
| 219 | E45SL13 | AAAAATTGGGAAGCCTGAATCT | 230 | E45SL24 | TTTTGGTATCTTACAGGAACTC |
| 220 | E45SL14 | GCCAGTATTCTACAGGAAAAAT | 221 | E45SL15 | TGCCAGTATTCTACAGGAAAAA |
| 220 | E45SL14 | GCCAGTATTCTACAGGAAAAAT | 222 | E45SL16 | AAAAACAGATGCCAGTATTCTA |
| 220 | E45SL14 | GCCAGTATTCTACAGGAAAAAT | 223 | E45SL17 | TGTCAGAACATTGAATGCAACT |
| 220 | E45SL14 | GCCAGTATTCTACAGGAAAAAT | 224 | E45SL18 | TTGTCAGAACATTGAATGCAAC |
| 220 | E45SL14 | GCCAGTATTCTACAGGAAAAAT | 225 | E45SL19 | GTTGTCAGAACATTGAATGCAA |
| 220 | E45SL14 | GCCAGTATTCTACAGGAAAAAT | 226 | E45SL20 | AACTCCAGGATGGCATTGGGCA |
| 220 | E45SL14 | GCCAGTATTCTACAGGAAAAAT | 227 | E45SL21 | TACAGGAACTCCAGGATGGCAT |
| 220 | E45SL14 | GCCAGTATTCTACAGGAAAAAT | 228 | E45SL22 | TTACAGGAACTCCAGGATGGCA |
| 220 | E45SL14 | GCCAGTATTCTACAGGAAAAAT | 229 | E45SL23 | GGTATCTTACAGGAACTCCAGG |
| 220 | E45SL14 | GCCAGTATTCTACAGGAAAAAT | 230 | E45SL24 | TTTTGGTATCTTACAGGAACTC |
| 221 | E45SL15 | TGCCAGTATTCTACAGGAAAAA | 222 | E45SL16 | AAAAACAGATGCCAGTATTCTA |
| 221 | E45SL15 | TGCCAGTATTCTACAGGAAAAA | 223 | E45SL17 | TGTCAGAACATTGAATGCAACT |
| 221 | E45SL15 | TGCCAGTATTCTACAGGAAAAA | 224 | E45SL18 | TTGTCAGAACATTGAATGCAAC |
| 221 | E45SL15 | TGCCAGTATTCTACAGGAAAAA | 225 | E45SL19 | GTTGTCAGAACATTGAATGCAA |
| 221 | E45SL15 | TGCCAGTATTCTACAGGAAAAA | 226 | E45SL20 | AACTCCAGGATGGCATTGGGCA |
| 221 | E45SL15 | TGCCAGTATTCTACAGGAAAAA | 227 | E45SL21 | TACAGGAACTCCAGGATGGCAT |
| 221 | E45SL15 | TGCCAGTATTCTACAGGAAAAA | 228 | E45SL22 | TTACAGGAACTCCAGGATGGCA |
| 221 | E45SL15 | TGCCAGTATTCTACAGGAAAAA | 229 | E45SL23 | GGTATCTTACAGGAACTCCAGG |
| 221 | E45SL15 | TGCCAGTATTCTACAGGAAAAA | 230 | E45SL24 | TTTTGGTATCTTACAGGAACTC |
| 222 | E45SL16 | AAAAACAGATGCCAGTATTCTA | 223 | E45SL17 | TGTCAGAACATTGAATGCAACT |
| 222 | E45SL16 | AAAAACAGATGCCAGTATTCTA | 224 | E45SL18 | TTGTCAGAACATTGAATGCAAC |
| 222 | E45SL16 | AAAAACAGATGCCAGTATTCTA | 225 | E45SL19 | GTTGTCAGAACATTGAATGCAA |
| 222 | E45SL16 | AAAAACAGATGCCAGTATTCTA | 226 | E45SL20 | AACTCCAGGATGGCATTGGGCA |
| 222 | E45SL16 | AAAAACAGATGCCAGTATTCTA | 227 | E45SL21 | TACAGGAACTCCAGGATGGCAT |
| 222 | E45SL16 | AAAAACAGATGCCAGTATTCTA | 228 | E45SL22 | TTACAGGAACTCCAGGATGGCA |
| 222 | E45SL16 | AAAAACAGATGCCAGTATTCTA | 229 | E45SL23 | GGTATCTTACAGGAACTCCAGG |
| 222 | E45SL16 | AAAAACAGATGCCAGTATTCTA | 230 | E45SL24 | TTTTGGTATCTTACAGGAACTC |
| 223 | E45SL17 | TGTCAGAACATTGAATGCAACT | 224 | E45SL18 | TTGTCAGAACATTGAATGCAAC |
| 223 | E45SL17 | TGTCAGAACATTGAATGCAACT | 225 | E45SL19 | GTTGTCAGAACATTGAATGCAA |
| 223 | E45SL17 | TGTCAGAACATTGAATGCAACT | 226 | E45SL20 | AACTCCAGGATGGCATTGGGCA |
| 223 | E45SL17 | TGTCAGAACATTGAATGCAACT | 227 | E45SL21 | TACAGGAACTCCAGGATGGCAT |
| 223 | E45SL17 | TGTCAGAACATTGAATGCAACT | 228 | E45SL22 | TTACAGGAACTCCAGGATGGCA |
| 223 | E45SL17 | TGTCAGAACATTGAATGCAACT | 229 | E45SL23 | GGTATCTTACAGGAACTCCAGG |
| 223 | E45SL17 | TGTCAGAACATTGAATGCAACT | 230 | E45SL24 | TTTTGGTATCTTACAGGAACTC |
| 224 | E45SL18 | TTGTCAGAACATTGAATGCAAC | 225 | E45SL19 | GTTGTCAGAACATTGAATGCAA |
| 224 | E45SL18 | TTGTCAGAACATTGAATGCAAC | 226 | E45SL20 | AACTCCAGGATGGCATTGGGCA |
| 224 | E45SL18 | TTGTCAGAACATTGAATGCAAC | 227 | E45SL21 | TACAGGAACTCCAGGATGGCAT |
| 224 | E45SL18 | TTGTCAGAACATTGAATGCAAC | 228 | E45SL22 | TTACAGGAACTCCAGGATGGCA |
| 224 | E45SL18 | TTGTCAGAACATTGAATGCAAC | 229 | E45SL23 | GGTATCTTACAGGAACTCCAGG |
| 224 | E45SL18 | TTGTCAGAACATTGAATGCAAC | 230 | E45SL24 | TTTTGGTATCTTACAGGAACTC |
| 225 | E45SL19 | GTTGTCAGAACATTGAATGCAA | 226 | E45SL20 | AACTCCAGGATGGCATTGGGCA |
| 225 | E45SL19 | GTTGTCAGAACATTGAATGCAA | 227 | E45SL21 | TACAGGAACTCCAGGATGGCAT |
| 225 | E45SL19 | GTTGTCAGAACATTGAATGCAA | 228 | E45SL22 | TTACAGGAACTCCAGGATGGCA |
| 225 | E45SL19 | GTTGTCAGAACATTGAATGCAA | 229 | E45SL23 | GGTATCTTACAGGAACTCCAGG |
| 225 | E45SL19 | GTTGTCAGAACATTGAATGCAA | 230 | E45SL24 | TTTTGGTATCTTACAGGAACTC |
| 226 | E45SL20 | AACTCCAGGATGGCATTGGGCA | 227 | E45SL21 | TACAGGAACTCCAGGATGGCAT |
| 226 | E45SL20 | AACTCCAGGATGGCATTGGGCA | 228 | E45SL22 | TTACAGGAACTCCAGGATGGCA |
| 226 | E45SL20 | AACTCCAGGATGGCATTGGGCA | 229 | E45SL23 | GGTATCTTACAGGAACTCCAGG |
| 226 | E45SL20 | AACTCCAGGATGGCATTGGGCA | 230 | E45SL24 | TTTTGGTATCTTACAGGAACTC |
| 227 | E45SL21 | TACAGGAACTCCAGGATGGCAT | 228 | E45SL22 | TTACAGGAACTCCAGGATGGCA |
| 227 | E45SL21 | TACAGGAACTCCAGGATGGCAT | 229 | E45SL23 | GGTATCTTACAGGAACTCCAGG |
| 227 | E45SL21 | TACAGGAACTCCAGGATGGCAT | 230 | E45SL24 | TTTTGGTATCTTACAGGAACTC |
| 228 | E45SL22 | TTACAGGAACTCCAGGATGGCA | 229 | E45SL23 | GGTATCTTACAGGAACTCCAGG |
| 228 | E45SL22 | TTACAGGAACTCCAGGATGGCA | 230 | E45SL24 | TTTTGGTATCTTACAGGAACTC |
| 229 | E45SL23 | GGTATCTTACAGGAACTCCAGG | 230 | E45SL24 | TTTTGGTATCTTACAGGAACTC |

### c) Exon 50:

TABLE 3A
(1) Exon 50 SaCas9 guides:

| Seq | Guide ID or | |
|---|---|---|
| ID No. | Guide RNA Name | Guide Sequence |
| 148 | E50SaCas9KKH1 | GGGATCCAGTATACTTACAGGC |
| 149 | E50SaCas9KKH2 | ATCCAGTATACTTACAGGCTCC |
| 150 | E50SaCas9KKH3 | CAGTATACTTACAGGCTCCAAT |
| 151 | E50SaCas9KKH4 | ATACTTACAGGCTCCAATAGTG |
| 152 | E50SaCas9KKH5 | CCAATAGTGGTCAGTCCAGGAG |
| 153 | E50SaCas9KKH6 | AGGCTGCTTTGCCCTCAGCTCT |
| 154 | E50SaCas9KKH7 | TTTGCCCTCAGCTCTTGAAGTA |
| 155 | E50SaCas9KKH8 | TTTACCGCCTTCCACTCAGAGC |
| 156 | E50SaCas9KKH10 | GGACTGACCACTATTGGAGCCT |
| 157 | E50SaCas9KKH11 | AAGATCTGAGCTCTGAGTGGAA |
| 158 | E50SaCas9KKH12 | AGGAAGTTAGAAGATCTGAGCT |
| 159 | E50SaCas9KKH13 | TTTTCTGTTAAAGAGGAAGTTA |

TABLE 3B
(2) Exon 50 SaCas9 pairs:

| Guide 1 | | | Guide 2 | | |
|---|---|---|---|---|---|
| Seq ID No. | Guide 1 | Guide 1 Sequence | Seq ID No. | Guide 2 | Guide 2 Sequence |
| 148 | E50SaCas9KKH | GGGATCCAGTATACTTACA | 149 | E50SaCas9KKH | ATCCAGTATACTTACAGGC |
| | 1 | GGC | | 2 | TCC |
| 148 | E50SaCas9KKH | GGGATCCAGTATACTTACA | 150 | E50SaCas9KKH | CAGTATACTTACAGGCTCC |
| | 1 | GGC | | 3 | AAT |
| 148 | E50SaCas9KKH | GGGATCCAGTATACTTACA | 151 | E50SaCas9KKH | ATACTTACAGGCTCCAATA |
| | 1 | GGC | | 4 | GTG |
| 148 | E50SaCas9KKH | GGGATCCAGTATACTTACA | 152 | E50SaCas9KKH | CCAATAGTGGTCAGTCCAG |
| | 1 | GGC | | 5 | GAG |
| 148 | E50SaCas9KKH | GGGATCCAGTATACTTACA | 153 | E50SaCas9KKH | AGGCTGCTTTGCCCTCAGC |
| | 1 | GGC | | 6 | TCT |
| 148 | E50SaCas9KKH | GGGATCCAGTATACTTACA | 154 | E50SaCas9KKH | TTTGCCCTCAGCTCTTGAA |
| | 1 | GGC | | 7 | GTA |
| 148 | E50SaCas9KKH | GGGATCCAGTATACTTACA | 155 | E50SaCas9KKH | TTTACCGCCTTCCACTCAG |
| | 1 | GGC | | 8 | AGC |
| 148 | E50SaCas9KKH | GGGATCCAGTATACTTACA | 156 | E50SaCas9KKH | GGACTGACCACTATTGGAG |
| | 1 | GGC | | 10 | CCT |
| 148 | E50SaCas9KKH | GGGATCCAGTATACTTACA | 157 | E50SaCas9KKH | AAGATCTGAGCTCTGAGTG |
| | 1 | GGC | | 11 | GAA |
| 148 | E50SaCas9KKH | GGGATCCAGTATACTTACA | 158 | E50SaCas9KKH | AGGAAGTTAGAAGATCTGA |
| | 1 | GGC | | 12 | GCT |
| 148 | E50SaCas9KKH | GGGATCCAGTATACTTACA | 159 | E50SaCas9KKH | TTTTCTGTTAAAGAGGAAG |
| | 1 | GGC | | 13 | TTA |
| 149 | E50SaCas9KKH | ATCCAGTATACTTACAGGC | 150 | E50SaCas9KKH | CAGTATACTTACAGGCTCC |
| | 2 | TCC | | 3 | AAT |
| 149 | E50SaCas9KKH | ATCCAGTATACTTACAGGC | 151 | E50SaCas9KKH | ATACTTACAGGCTCCAATA |
| | 2 | TCC | | 4 | GTG |
| 149 | E50SaCas9KKH | ATCCAGTATACTTACAGGC | 152 | E50SaCas9KKH | CCAATAGTGGTCAGTCCAG |
| | 2 | TCC | | 5 | GAG |
| 149 | E50SaCas9KKH | ATCCAGTATACTTACAGGC | 153 | E50SaCas9KKH | AGGCTGCTTTGCCCTCAGC |
| | 2 | TCC | | 6 | TCT |
| 149 | E50SaCas9KKH | ATCCAGTATACTTACAGGC | 154 | E50SaCas9KKH | TTTGCCCTCAGCTCTTGAA |
| | 2 | TCC | | 7 | GTA |
| 149 | E50SaCas9KKH | ATCCAGTATACTTACAGGC | 155 | E50SaCas9KKH | TTTACCGCCTTCCACTCAG |
| | 2 | TCC | | 8 | AGC |
| 149 | E50SaCas9KKH | ATCCAGTATACTTACAGGC | 156 | E50SaCas9KKH | GGACTGACCACTATTGGAG |
| | 2 | TCC | | 10 | CCT |
| 149 | E50SaCas9KKH | ATCCAGTATACTTACAGGC | 157 | E50SaCas9KKH | AAGATCTGAGCTCTGAGTG |
| | 2 | TCC | | 11 | GAA |
| 149 | E50SaCas9KKH | ATCCAGTATACTTACAGGC | 158 | E50SaCas9KKH | AGGAAGTTAGAAGATCTGA |
| | 2 | TCC | | 12 | GCT |
| 149 | E50SaCas9KKH | ATCCAGTATACTTACAGGC | 159 | E50SaCas9KKH | TTTTCTGTTAAAGAGGAAG |
| | 2 | TCC | | 13 | TTA |
| 150 | E50SaCas9KKH | CAGTATACTTACAGGCTCC | 151 | E50SaCas9KKH | ATACTTACAGGCTCCAATA |
| | 3 | AAT | | 4 | GTG |
| 150 | E50SaCas9KKH | CAGTATACTTACAGGCTCC | 152 | E50SaCas9KKH | CCAATAGTGGTCAGTCCAG |
| | 3 | AAT | | 5 | GAG |
| 150 | E50SaCas9KKH | CAGTATACTTACAGGCTCC | 153 | E50SaCas9KKH | AGGCTGCTTTGCCCTCAGC |
| | 3 | AAT | | 6 | TCT |
| 150 | E50SaCas9KKH | CAGTATACTTACAGGCTCC | 154 | E50SaCas9KKH | TTTGCCCTCAGCTCTTGAA |
| | 3 | AAT | | 7 | GTA |
| 150 | E50SaCas9KKH | CAGTATACTTACAGGCTCC | 155 | E50SaCas9KKH | TTTACCGCCTTCCACTCAG |
| | 3 | AAT | | 8 | AGC |
| 150 | E50SaCas9KKH | CAGTATACTTACAGGCTCC | 156 | E50SaCas9KKH | GGACTGACCACTATTGGAG |
| | 3 | AAT | | 10 | CCT |
| 150 | E50SaCas9KKH | CAGTATACTTACAGGCTCC | 157 | E50SaCas9KKH | AAGATCTGAGCTCTGAGTG |
| | 3 | AAT | | 11 | GAA |
| 150 | E50SaCas9KKH | CAGTATACTTACAGGCTCC | 158 | E50SaCas9KKH | AGGAAGTTAGAAGATCTGA |
| | 3 | AAT | | 12 | GCT |
| 150 | E50SaCas9KKH | CAGTATACTTACAGGCTCC | 159 | E50SaCas9KKH | TTTTCTGTTAAAGAGGAAG |
| | 3 | AAT | | 13 | TTA |
| 151 | E50SaCas9KKH | ATACTTACAGGCTCCAATA | 152 | E50SaCas9KKH | CCAATAGTGGTCAGTCCAG |
| | 4 | GTG | | 5 | GAG |
| 151 | E50SaCas9KKH | ATACTTACAGGCTCCAATA | 153 | E50SaCas9KKH | AGGCTGCTTTGCCCTCAGC |
| | 4 | GTG | | 6 | TCT |
| 151 | E50SaCas9KKH | ATACTTACAGGCTCCAATA | 154 | E50SaCas9KKH | TTTGCCCTCAGCTCTTGAA |
| | 4 | GTG | | 7 | GTA |
| 151 | E50SaCas9KKH | ATACTTACAGGCTCCAATA | 155 | E50SaCas9KKH | TTTACCGCCTTCCACTCAG |
| | 4 | GTG | | 8 | AGC |
| 151 | E50SaCas9KKH | ATACTTACAGGCTCCAATA | 156 | E50SaCas9KKH | GGACTGACCACTATTGGAG |
| | 4 | GTG | | 10 | CCT |
| 151 | E50SaCas9KKH | ATACTTACAGGCTCCAATA | 157 | E50SaCas9KKH | AAGATCTGAGCTCTGAGTG |
| | 4 | GTG | | 11 | GAA |
| 151 | E50SaCas9KKH | ATACTTACAGGCTCCAATA | 158 | E50SaCas9KKH | AGGAAGTTAGAAGATCTGA |
| | 4 | GTG | | 12 | GCT |
| 151 | E50SaCas9KKH | ATACTTACAGGCTCCAATA | 159 | E50SaCas9KKH | TTTTCTGTTAAAGAGGAAG |
| | 4 | GTG | | 13 | TTA |
| 152 | E50SaCas9KKH | CCAATAGTGGTCAGTCCAG | 153 | E50SaCas9KKH | AGGCTGCTTTGCCCTCAGC |
| | 5 | GAG | | 6 | TCT |
| 152 | E50SaCas9KKH | CCAATAGTGGTCAGTCCAG | 154 | E50SaCas9KKH | TTTGCCCTCAGCTCTTGAA |
| | 5 | GAG | | 7 | GTA |
| 152 | E50SaCas9KKH | CCAATAGTGGTCAGTCCAG | 155 | E50SaCas9KKH | TTTACCGCCTTCCACTCAG |
| | 5 | GAG | | 8 | AGC |
| 152 | E50SaCas9KKH | CCAATAGTGGTCAGTCCAG | 156 | E50SaCas9KKH | GGACTGACCACTATTGGAG |
| | 5 | GAG | | 10 | CCT |
| 152 | E50SaCas9KKH | CCAATAGTGGTCAGTCCAG | 157 | E50SaCas9KKH | AAGATCTGAGCTCTGAGTG |
| | 5 | GAG | | 11 | GAA |
| 152 | E50SaCas9KKH | CCAATAGTGGTCAGTCCAG | 158 | E50SaCas9KKH | AGGAAGTTAGAAGATCTGA |
| | 5 | GAG | | 12 | GCT |
| 152 | E50SaCas9KKH | CCAATAGTGGTCAGTCCAG | 159 | E50SaCas9KKH | TTTTCTGTTAAAGAGGAAG |
| | 5 | GAG | | 13 | TTA |
| 153 | E50SaCas9KKH | AGGCTGCTTTGCCCTCAGC | 154 | E50SaCas9KKH | TTTGCCCTCAGCTCTTGAA |
| | 6 | TCT | | 7 | GTA |
| 153 | E50SaCas9KKH | AGGCTGCTTTGCCCTCAGC | 155 | E50SaCas9KKH | TTTACCGCCTTCCACTCAG |
| | 6 | TCT | | 8 | AGC |
| 153 | E50SaCas9KKH | AGGCTGCTTTGCCCTCAGC | 156 | E50SaCas9KKH | GGACTGACCACTATTGGAG |
| | 6 | TCT | | 10 | CCT |
| 153 | E50SaCas9KKH | AGGCTGCTTTGCCCTCAGC | 157 | E50SaCas9KKH | AAGATCTGAGCTCTGAGTG |
| | 6 | TCT | | 11 | GAA |
| 153 | E50SaCas9KKH | AGGCTGCTTTGCCCTCAGC | 158 | E50SaCas9KKH | AGGAAGTTAGAAGATCTGA |
| | 6 | TCT | | 12 | GCT |
| 153 | E50SaCas9KKH | AGGCTGCTTTGCCCTCAGC | 159 | E50SaCas9KKH | TTTTCTGTTAAAGAGGAAG |
| | 6 | TCT | | 13 | TTA |
| 154 | E50SaCas9KKH | TTTGCCCTCAGCTCTTGAA | 155 | E50SaCas9KKH | TTTACCGCCTTCCACTCAG |
| | 7 | GTA | | 8 | AGC |
| 154 | E50SaCas9KKH | TTTGCCCTCAGCTCTTGAA | 156 | E50SaCas9KKH | GGACTGACCACTATTGGAG |
| | 7 | GTA | | 10 | CCT |
| 154 | E50SaCas9KKH | TTTGCCCTCAGCTCTTGAA | 157 | E50SaCas9KKH | AAGATCTGAGCTCTGAGTG |
| | 7 | GTA | | 11 | GAA |
| 154 | E50SaCas9KKH | TTTGCCCTCAGCTCTTGAA | 158 | E50SaCas9KKH | AGGAAGTTAGAAGATCTGA |
| | 7 | GTA | | 12 | GCT |
| 154 | E50SaCas9KKH | TTTGCCCTCAGCTCTTGAA | 159 | E50SaCas9KKH | TTTTCTGTTAAAGAGGAAG |
| | 7 | GTA | | 13 | TTA |
| 155 | E50SaCas9KKH | TTTACCGCCTTCCACTCAG | 156 | E50SaCas9KKH | GGACTGACCACTATTGGAG |
| | 8 | AGC | | 10 | CCT |
| 155 | E50SaCas9KKH | TTTACCGCCTTCCACTCAG | 157 | E50SaCas9KKH | AAGATCTGAGCTCTGAGTG |
| | 8 | AGC | | 11 | GAA |
| 155 | E50SaCas9KKH | TTTACCGCCTTCCACTCAG | 158 | E50SaCas9KKH | AGGAAGTTAGAAGATCTGA |
| | 8 | AGC | | 12 | GCT |
| 155 | E50SaCas9KKH | TTTACCGCCTTCCACTCAG | 159 | E50SaCas9KKH | TTTTCTGTTAAAGAGGAAG |
| | 8 | AGC | | 13 | TTA |
| 156 | E50SaCas9KKH | GGACTGACCACTATTGGAG | 157 | E50SaCas9KKH | AAGATCTGAGCTCTGAGTG |
| | 10 | CCT | | 11 | GAA |
| 156 | E50SaCas9KKH | GGACTGACCACTATTGGAG | 158 | E50SaCas9KKH | AGGAAGTTAGAAGATCTGA |
| | 10 | CCT | | 12 | GCT |
| 156 | E50SaCas9KKH | GGACTGACCACTATTGGAG | 159 | E50SaCas9KKH | TTTTCTGTTAAAGAGGAAG |
| | 10 | CCT | | 13 | TTA |
| 157 | E50SaCas9KKH | AAGATCTGAGCTCTGAGTG | 158 | E50SaCas9KKH | AGGAAGTTAGAAGATCTGA |
| | 11 | GAA | | 12 | GCT |
| 157 | E50SaCas9KKH | AAGATCTGAGCTCTGAGTG | 159 | E50SaCas9KKH | TTTTCTGTTAAAGAGGAAG |
| | 11 | GAA | | 13 | TTA |
| 158 | E50SaCas9KKH | AGGAAGTTAGAAGATCTGA | 159 | E50SaCas9KKH | TTTTCTGTTAAAGAGGAAG |
| | 12 | GCT | | 13 | TTA |

TABLE 3C
(3) Exon 50 SluCas9 guides:

| Seq | Guide ID or | |
|---|---|---|
| ID No. | Guide RNA Name | Sequence |
| 231 | E50Slu2 | AGTATACTTACAGGCTCCAATA |
| 232 | E50Slu3 | CAGGCTCCAATAGTGGTCAGTC |
| 233 | E50Slu4 | CAATAGTGGTCAGTCCAGGAGC |
| 234 | E50Slu5 | GTGGTCAGTCCAGGAGCTAGGT |
| 235 | E50Slu6 | TTGCCCTCAGCTCTTGAAGTAA |
| 236 | E50Slu9 | CTAGCTCCTGGACTGACCACTA |
| 237 | E50Slu10 | GCAAAGCAGCCTGACCTAGCTC |
| 238 | E50Slu11 | AAACCGTTTACTTCAAGAGCTG |
| 239 | E50Slu12 | TAAACCGTTTACTTCAAGAGCT |
| 240 | E50Slu13 | AGATCTGAGCTCTGAGTGGAAG |
| 241 | E50Slu14 | AGAAGATCTGAGCTCTGAGTGG |
| 242 | E50Slu15 | AGTTAGAAGATCTGAGCTCTGA |

TABLE 3D
(4) Exon 50 SluCas9 pairs:

| Guide 1 | | | Guide 2 | | |
|---|---|---|---|---|---|
| Seq ID No. | Guide 1 | Guide 1 Sequence | Seq ID No. | Guide 2 | Guide 2 Sequence |
| 231 | E50SL2 | AGTATACTTACAGGCTCCAATA | 232 | E50SL3 | CAGGCTCCAATAGTGGTCAGTC |
| 231 | E50SL2 | AGTATACTTACAGGCTCCAATA | 233 | E50SL4 | CAATAGTGGTCAGTCCAGGAGC |
| 231 | E50SL2 | AGTATACTTACAGGCTCCAATA | 234 | E50SL5 | GTGGTCAGTCCAGGAGCTAGGT |
| 231 | E50SL2 | AGTATACTTACAGGCTCCAATA | 235 | E50SL6 | TTGCCCTCAGCTCTTGAAGTAA |
| 231 | E50SL2 | AGTATACTTACAGGCTCCAATA | 236 | E50SL9 | CTAGCTCCTGGACTGACCACTA |
| 231 | E50SL2 | AGTATACTTACAGGCTCCAATA | 237 | E50SL10 | GCAAAGCAGCCTGACCTAGCTC |
| 231 | E50SL2 | AGTATACTTACAGGCTCCAATA | 238 | E50SL11 | AAACCGTTTACTTCAAGAGCTG |
| 231 | E50SL2 | AGTATACTTACAGGCTCCAATA | 239 | E50SL12 | TAAACCGTTTACTTCAAGAGCT |
| 231 | E50SL2 | AGTATACTTACAGGCTCCAATA | 240 | E50SL13 | AGATCTGAGCTCTGAGTGGAAG |
| 231 | E50SL2 | AGTATACTTACAGGCTCCAATA | 241 | E50SL14 | AGAAGATCTGAGCTCTGAGTGG |
| 231 | E50SL2 | AGTATACTTACAGGCTCCAATA | 242 | E50SL15 | AGTTAGAAGATCTGAGCTCTGA |
| 232 | E50SL3 | CAGGCTCCAATAGTGGTCAGTC | 233 | E50SL4 | CAATAGTGGTCAGTCCAGGAGC |
| 232 | E50SL3 | CAGGCTCCAATAGTGGTCAGTC | 234 | E50SL5 | GTGGTCAGTCCAGGAGCTAGGT |
| 232 | E50SL3 | CAGGCTCCAATAGTGGTCAGTC | 235 | E50SL6 | TTGCCCTCAGCTCTTGAAGTAA |
| 232 | E50SL3 | CAGGCTCCAATAGTGGTCAGTC | 236 | E50SL9 | CTAGCTCCTGGACTGACCACTA |
| 232 | E50SL3 | CAGGCTCCAATAGTGGTCAGTC | 237 | E50SL10 | GCAAAGCAGCCTGACCTAGCTC |
| 232 | E50SL3 | CAGGCTCCAATAGTGGTCAGTC | 238 | E50SL11 | AAACCGTTTACTTCAAGAGCTG |
| 232 | E50SL3 | CAGGCTCCAATAGTGGTCAGTC | 239 | E50SL12 | TAAACCGTTTACTTCAAGAGCT |
| 232 | E50SL3 | CAGGCTCCAATAGTGGTCAGTC | 240 | E50SL13 | AGATCTGAGCTCTGAGTGGAAG |
| 232 | E50SL3 | CAGGCTCCAATAGTGGTCAGTC | 241 | E50SL14 | AGAAGATCTGAGCTCTGAGTGG |
| 232 | E50SL3 | CAGGCTCCAATAGTGGTCAGTC | 242 | E50SL15 | AGTTAGAAGATCTGAGCTCTGA |
| 233 | E50SL4 | CAATAGTGGTCAGTCCAGGAGC | 234 | E50SL5 | GTGGTCAGTCCAGGAGCTAGGT |
| 233 | E50SL4 | CAATAGTGGTCAGTCCAGGAGC | 235 | E50SL6 | TTGCCCTCAGCTCTTGAAGTAA |
| 233 | E50SL4 | CAATAGTGGTCAGTCCAGGAGC | 236 | E50SL9 | CTAGCTCCTGGACTGACCACTA |
| 233 | E50SL4 | CAATAGTGGTCAGTCCAGGAGC | 237 | E50SL10 | GCAAAGCAGCCTGACCTAGCTC |
| 233 | E50SL4 | CAATAGTGGTCAGTCCAGGAGC | 238 | E50SL11 | AAACCGTTTACTTCAAGAGCTG |
| 233 | E50SL4 | CAATAGTGGTCAGTCCAGGAGC | 239 | E50SL12 | TAAACCGTTTACTTCAAGAGCT |
| 233 | E50SL4 | CAATAGTGGTCAGTCCAGGAGC | 240 | E50SL13 | AGATCTGAGCTCTGAGTGGAAG |
| 233 | E50SL4 | CAATAGTGGTCAGTCCAGGAGC | 241 | E50SL14 | AGAAGATCTGAGCTCTGAGTGG |
| 233 | E50SL4 | CAATAGTGGTCAGTCCAGGAGC | 242 | E50SL15 | AGTTAGAAGATCTGAGCTCTGA |
| 234 | E50SL5 | GTGGTCAGTCCAGGAGCTAGGT | 235 | E50SL6 | TTGCCCTCAGCTCTTGAAGTAA |
| 234 | E50SL5 | GTGGTCAGTCCAGGAGCTAGGT | 236 | E50SL9 | CTAGCTCCTGGACTGACCACTA |
| 234 | E50SL5 | GTGGTCAGTCCAGGAGCTAGGT | 237 | E50SL10 | GCAAAGCAGCCTGACCTAGCTC |
| 234 | E50SL5 | GTGGTCAGTCCAGGAGCTAGGT | 238 | E50SL11 | AAACCGTTTACTTCAAGAGCTG |
| 234 | E50SL5 | GTGGTCAGTCCAGGAGCTAGGT | 239 | E50SL12 | TAAACCGTTTACTTCAAGAGCT |
| 234 | E50SL5 | GTGGTCAGTCCAGGAGCTAGGT | 240 | E50SL13 | AGATCTGAGCTCTGAGTGGAAG |
| 234 | E50SL5 | GTGGTCAGTCCAGGAGCTAGGT | 241 | E50SL14 | AGAAGATCTGAGCTCTGAGTGG |
| 234 | E50SL5 | GTGGTCAGTCCAGGAGCTAGGT | 242 | E50SL15 | AGTTAGAAGATCTGAGCTCTGA |
| 235 | E50SL6 | TTGCCCTCAGCTCTTGAAGTAA | 236 | E50SL9 | CTAGCTCCTGGACTGACCACTA |
| 235 | E50SL6 | TTGCCCTCAGCTCTTGAAGTAA | 237 | E50SL10 | GCAAAGCAGCCTGACCTAGCTC |
| 235 | E50SL6 | TTGCCCTCAGCTCTTGAAGTAA | 238 | E50SL11 | AAACCGTTTACTTCAAGAGCTG |
| 235 | E50SL6 | TTGCCCTCAGCTCTTGAAGTAA | 239 | E50SL12 | TAAACCGTTTACTTCAAGAGCT |
| 235 | E50SL6 | TTGCCCTCAGCTCTTGAAGTAA | 240 | E50SL13 | AGATCTGAGCTCTGAGTGGAAG |
| 235 | E50SL6 | TTGCCCTCAGCTCTTGAAGTAA | 241 | E50SL14 | AGAAGATCTGAGCTCTGAGTGG |
| 235 | E50SL6 | TTGCCCTCAGCTCTTGAAGTAA | 242 | E50SL15 | AGTTAGAAGATCTGAGCTCTGA |
| 236 | E50SL9 | CTAGCTCCTGGACTGACCACTA | 237 | E50SL10 | GCAAAGCAGCCTGACCTAGCTC |
| 236 | E50SL9 | CTAGCTCCTGGACTGACCACTA | 238 | E50SL11 | AAACCGTTTACTTCAAGAGCTG |
| 236 | E50SL9 | CTAGCTCCTGGACTGACCACTA | 239 | E50SL12 | TAAACCGTTTACTTCAAGAGCT |
| 236 | E50SL9 | CTAGCTCCTGGACTGACCACTA | 240 | E50SL13 | AGATCTGAGCTCTGAGTGGAAG |
| 236 | E50SL9 | CTAGCTCCTGGACTGACCACTA | 241 | E50SL14 | AGAAGATCTGAGCTCTGAGTGG |
| 236 | E50SL9 | CTAGCTCCTGGACTGACCACTA | 242 | E50SL15 | AGTTAGAAGATCTGAGCTCTGA |
| 237 | E50SL10 | GCAAAGCAGCCTGACCTAGCTC | 238 | E50SL11 | AAACCGTTTACTTCAAGAGCTG |
| 237 | E50SL10 | GCAAAGCAGCCTGACCTAGCTC | 239 | E50SL12 | TAAACCGTTTACTTCAAGAGCT |
| 237 | E50SL10 | GCAAAGCAGCCTGACCTAGCTC | 240 | E50SL13 | AGATCTGAGCTCTGAGTGGAAG |
| 237 | E50SL10 | GCAAAGCAGCCTGACCTAGCTC | 241 | E50SL14 | AGAAGATCTGAGCTCTGAGTGG |
| 237 | E50SL10 | GCAAAGCAGCCTGACCTAGCTC | 242 | E50SL15 | AGTTAGAAGATCTGAGCTCTGA |
| 238 | E50SL11 | AAACCGTTTACTTCAAGAGCTG | 239 | E50SL12 | TAAACCGTTTACTTCAAGAGCT |
| 238 | E50SL11 | AAACCGTTTACTTCAAGAGCTG | 240 | E50SL13 | AGATCTGAGCTCTGAGTGGAAG |
| 238 | E50SL11 | AAACCGTTTACTTCAAGAGCTG | 241 | E50SL14 | AGAAGATCTGAGCTCTGAGTGG |
| 238 | E50SL11 | AAACCGTTTACTTCAAGAGCTG | 242 | E50SL15 | AGTTAGAAGATCTGAGCTCTGA |
| 239 | E50SL12 | TAAACCGTTTACTTCAAGAGCT | 240 | E50SL13 | AGATCTGAGCTCTGAGTGGAAG |
| 239 | E50SL12 | TAAACCGTTTACTTCAAGAGCT | 241 | E50SL14 | AGAAGATCTGAGCTCTGAGTGG |
| 239 | E50SL12 | TAAACCGTTTACTTCAAGAGCT | 242 | E50SL15 | AGTTAGAAGATCTGAGCTCTGA |
| 240 | E50SL13 | AGATCTGAGCTCTGAGTGGAAG | 241 | E50SL14 | AGAAGATCTGAGCTCTGAGTGG |
| 240 | E50SL13 | AGATCTGAGCTCTGAGTGGAAG | 242 | E50SL15 | AGTTAGAAGATCTGAGCTCTGA |
| 241 | E50SL14 | AGAAGATCTGAGCTCTGAGTGG | 242 | E50SL15 | AGTTAGAAGATCTGAGCTCTGA |

### d) Exon 51:

TABLE 4A
(1) Exon 51 SaCas9 guides:

| Seq | Guide ID or | |
|---|---|---|
| ID No. | Guide RNA Name | Guide Sequence |
| 11 | E51Sa1 | TAGTAACCACAGGTTGTGTCAC |
| 12 | E51Sa2 | GTTGTGTCACCAGAGTAACAGT |
| 13 | E51Sa4 | GAGGGTGATGGTGGGTGACCTT |
| 14 | E51Sa5 | TATAAAATCACAGAGGGTGATG |
| 15 | E51Sa6 | TTGATCAAGTTATAAAATCACA |
| 27 | E51SaCas9KKH1 | TCATTTTTTCTCATACCTTCTG |
| 28 | E51SaCas9KKH2 | TTTTTTCTCATACCTTCTGCTT |
| 29 | E51SaCas9KKH3 | CCTTCTGCTTGATGATCATCTC |
| 30 | E51SaCas9KKH4 | ATGATCATCTCGTTGATATCCT |
| 31 | E51SaCas9KKH5 | AAGGTCACCCACCATCACCCTC |
| 32 | E51SaCas9KKH6 | ATCACCCTCTGTGATTTTATAA |
| 33 | E51SaCas9KKH7 | ATAACTTGATCAAGCAGAGAAA |
| 34 | E51SaCas9KKH8 | CTTGATCAAGCAGAGAAAGCCA |
| 35 | E51SaCas9KKH9 | ATCAAGCAGAGAAAGCCAGTCG |
| 36 | E51SaCas9KKH10 | CAGTCGGTAAGTTCTGTCCAAG |
| 37 | E51SaCas9KKH11 | GTAAGTTCTGTCCAAGCCCGGT |
| 38 | E51SaCas9KKH12 | AGCCCGGTTGAAATCTGCCAGA |
| 39 | E51SaCas9KKH13 | AGCAGGTACCTCCAACATCAAG |
| 40 | E51SaCas9KKH14 | CAACATCAAGGAAGATGGCATT |
| 41 | E51SaCas9KKH15 | AGGAAGATGGCATTTCTAGTTT |
| 42 | E51SaCas9KKH16 | ATGGCATTTCTAGTTTGGAGAT |
| 43 | E51SaCas9KKH17 | CTAGTTTGGAGATGGCAGTTTC |
| 44 | E51SaCas9KKH18 | GATGGCAGTTTCCTTAGTAACC |
| 45 | E51SaCas9KKH19 | TAGTAACCACAGGTTGTGTCAC |
| 46 | E51SaCas9KKH20 | CCACAGGTTGTGTCACCAGAGT |
| 47 | E51SaCas9KKH21 | GTTGTGTCACCAGAGTAACAGT |
| 48 | E51SaCas9KKH22 | GAGTAACAGTCTGAGTAGGAGC |
| 49 | E51SaCas9KKH23 | TCTGAGTAGGAGCTAAAATATT |
| 50 | E51SaCas9KKH24 | AGAAGGTATGAGAAAAAATGAT |
| 51 | E51SaCas9KKH25 | TCAAGCAGAAGGTATGAGAAAA |
| 52 | E51SaCas9KKH26 | TCATCAAGCAGAAGGTATGAGA |
| 53 | E51SaCas9KKH27 | TCAACGAGATGATCATCAAGCA |
| 54 | E51SaCas9KKH28 | GTGACCTTGAGGATATCAACGA |
| 55 | E51SaCas9KKH29 | TGGGTGACCTTGAGGATATCAA |
| 56 | E51SaCas9KKH30 | GAGGGTGATGGTGGGTGACCTT |
| 57 | E51SaCas9KKH31 | TATAAAATCACAGAGGGTGATG |
| 58 | E51SaCas9KKH32 | AAGTTATAAAATCACAGAGGGT |
| 59 | E51SaCas9KKH33 | ATCAAGTTATAAAATCACAGAG |
| 60 | E51SaCas9KKH34 | TTGATCAAGTTATAAAATCACA |
| 61 | E51SaCas9KKH35 | CTTTCTCTGCTTGATCAAGTTA |
| 62 | E51SaCas9KKH36 | CCGACTGGCTTTCTCTGCTTGA |
| 63 | E51SaCas9KKH37 | ACTTACCGACTGGCTTTCTCTG |
| 64 | E51SaCas9KKH38 | GATGTTGGAGGTACCTGCTCTG |
| 65 | E51SaCas9KKH39 | AAATGCCATCTTCCTTGATGTT |
| 66 | E51SaCas9KKH40 | CCAAACTAGAAATGCCATCTTC |
| 67 | E51SaCas9KKH41 | AGGAAACTGCCATCTCCAAACT |
| 68 | E51SaCas9KKH42 | CTGTTACTCTGGTGACACAACC |
| 69 | E51SaCas9KKH43 | TAGCTCCTACTCAGACTGTTAC |

TABLE 4B
(2) Exon 51 SaCas9 pairs:

| Guide 1 | | | Guide 2 | | |
|---|---|---|---|---|---|
| Seq ID No. | Guide 1 | Guide 1 Sequence | Seq ID No. | Guide 2 | Guide 2 Sequence |
| 11 | E51Sa1 | TAGTAACCACAGGTTGTGT | 12 | E51Sa2 | GTTGTGTCACCAGAGTAAC |
| | | CAC | | | AGT |
| 11 | E51Sa1 | TAGTAACCACAGGTTGTGT | 13 | E51Sa4 | GAGGGTGATGGTGGGTGAC |
| | | CAC | | | CTT |
| 11 | E51Sa1 | TAGTAACCACAGGTTGTGT | 14 | E51Sa5 | TATAAAATCACAGAGGGTG |
| | | CAC | | | ATG |
| 11 | E51Sa1 | TAGTAACCACAGGTTGTGT | 15 | E51Sa6 | TTGATCAAGTTATAAAATC |
| | | CAC | | | ACA |
| 12 | E51Sa2 | GTTGTGTCACCAGAGTAAC | 13 | E51Sa4 | GAGGGTGATGGTGGGTGAC |
| | | AGT | | | CTT |
| 12 | E51Sa2 | GTTGTGTCACCAGAGTAAC | 14 | E51Sa5 | TATAAAATCACAGAGGGTG |
| | | AGT | | | ATG |
| 12 | E51Sa2 | GTTGTGTCACCAGAGTAAC | 15 | E51Sa6 | TTGATCAAGTTATAAAATC |
| | | AGT | | | ACA |
| 13 | E51Sa4 | GAGGGTGATGGTGGGTGAC | 14 | E51Sa5 | TATAAAATCACAGAGGGTG |
| | | CTT | | | ATG |
| 13 | E51Sa4 | GAGGGTGATGGTGGGTGAC | 15 | E51Sa6 | TTGATCAAGTTATAAAATC |
| | | CTT | | | ACA |
| 14 | E51Sa5 | TATAAAATCACAGAGGGTG | 15 | E51Sa6 | TTGATCAAGTTATAAAATC |
| | | ATG | | | ACA |
| 27 | E51SaCas9KKH | TCATTTTTTCTCATACCTT | 28 | E51SaCas9KKH | TTTTTTCTCATACCTTCTG |
| | 1 | CTG | | 2 | CTT |
| 27 | E51SaCas9KKH | TCATTTTTTCTCATACCTT | 29 | E51SaCas9KKH | CCTTCTGCTTGATGATCAT |
| | 1 | CTG | | 3 | CTC |
| 27 | E51SaCas9KKH | TCATTTTTTCTCATACCTT | 30 | E51SaCas9KKH | ATGATCATCTCGTTGATAT |
| | 1 | CTG | | 4 | CCT |
| 27 | E51SaCas9KKH | TCATTTTTTCTCATACCTT | 31 | E51SaCas9KKH | AAGGTCACCCACCATCACC |
| | 1 | CTG | | 5 | CTC |
| 27 | E51SaCas9KKH | TCATTTTTTCTCATACCTT | 32 | E51SaCas9KKH | ATCACCCTCTGTGATTTTA |
| | 1 | CTG | | 6 | TAA |
| 27 | E51SaCas9KKH | TCATTTTTTCTCATACCTT | 33 | E51SaCas9KKH | ATAACTTGATCAAGCAGAG |
| | 1 | CTG | | 7 | AAA |
| 27 | E51SaCas9KKH | TCATTTTTTCTCATACCTT | 34 | E51SaCas9KKH | CTTGATCAAGCAGAGAAAG |
| | 1 | CTG | | 8 | CCA |
| 27 | E51SaCas9KKH | TCATTTTTTCTCATACCTT | 35 | E51SaCas9KKH | ATCAAGCAGAGAAAGCCAG |
| | 1 | CTG | | 9 | TCG |
| 27 | E51SaCas9KKH | TCATTTTTTCTCATACCTT | 36 | E51SaCas9KKH | CAGTCGGTAAGTTCTGTCC |
| | 1 | CTG | | 10 | AAG |
| 27 | E51SaCas9KKH | TCATTTTTTCTCATACCTT | 37 | E51SaCas9KKH | GTAAGTTCTGTCCAAGCCC |
| | 1 | CTG | | 11 | GGT |
| 27 | E51SaCas9KKH | TCATTTTTTCTCATACCTT | 38 | E51SaCas9KKH | AGCCCGGTTGAAATCTGCC |
| | 1 | CTG | | 12 | AGA |
| 27 | E51SaCas9KKH | TCATTTTTTCTCATACCTT | 39 | E51SaCas9KKH | AGCAGGTACCTCCAACATC |
| | 1 | CTG | | 13 | AAG |
| 27 | E51SaCas9KKH | TCATTTTTTCTCATACCTT | 40 | E51SaCas9KKH | CAACATCAAGGAAGATGGC |
| | 1 | CTG | | 14 | ATT |
| 27 | E51SaCas9KKH | TCATTTTTTCTCATACCTT | 41 | E51SaCas9KKH | AGGAAGATGGCATTTCTAG |
| | 1 | CTG | | 15 | TTT |
| 27 | E51SaCas9KKH | TCATTTTTTCTCATACCTT | 42 | E51SaCas9KKH | ATGGCATTTCTAGTTTGGA |
| | 1 | CTG | | 16 | GAT |
| 27 | E51SaCas9KKH | TCATTTTTTCTCATACCTT | 43 | E51SaCas9KKH | CTAGTTTGGAGATGGCAGT |
| | 1 | CTG | | 17 | TTC |
| 27 | E51SaCas9KKH | TCATTTTTTCTCATACCTT | 44 | E51SaCas9KKH | GATGGCAGTTTCCTTAGTA |
| | 1 | CTG | | 18 | ACC |
| 27 | E51SaCas9KKH | TCATTTTTTCTCATACCTT | 45 | E51SaCas9KKH | TAGTAACCACAGGTTGTGT |
| | 1 | CTG | | 19 | CAC |
| 27 | E51SaCas9KKH | TCATTTTTTCTCATACCTT | 46 | E51SaCas9KKH | CCACAGGTTGTGTCACCAG |
| | 1 | CTG | | 20 | AGT |
| 27 | E51SaCas9KKH | TCATTTTTTCTCATACCTT | 47 | E51SaCas9KKH | GTTGTGTCACCAGAGTAAC |
| | 1 | CTG | | 21 | AGT |
| 27 | E51SaCas9KKH | TCATTTTTTCTCATACCTT | 48 | E51SaCas9KKH | GAGTAACAGTCTGAGTAGG |
| | 1 | CTG | | 22 | AGC |
| 27 | E51SaCas9KKH | TCATTTTTTCTCATACCTT | 53 | E51SaCas9KKH | TCAACGAGATGATCATCAA |
| | 1 | CTG | | 27 | GCA |
| 27 | E51SaCas9KKH | TCATTTTTTCTCATACCTT | 54 | E51SaCas9KKH | GTGACCTTGAGGATATCAA |
| | 1 | CTG | | 28 | CGA |
| 27 | E51SaCas9KKH | TCATTTTTTCTCATACCTT | 55 | E51SaCas9KKH | TGGGTGACCTTGAGGATAT |
| | 1 | CTG | | 29 | CAA |
| 27 | E51SaCas9KKH | TCATTTTTTCTCATACCTT | 56 | E51SaCas9KKH | GAGGGTGATGGTGGGTGAC |
| | 1 | CTG | | 30 | CTT |
| 27 | E51SaCas9KKH | TCATTTTTTCTCATACCTT | 57 | E51SaCas9KKH | TATAAAATCACAGAGGGTG |
| | 1 | CTG | | 31 | ATG |
| 27 | E51SaCas9KKH | TCATTTTTTCTCATACCTT | 58 | E51SaCas9KKH | AAGTTATAAAATCACAGAG |
| | 1 | CTG | | 32 | GGT |
| 27 | E51SaCas9KKH | TCATTTTTTCTCATACCTT | 59 | E51SaCas9KKH | ATCAAGTTATAAAATCACA |
| | 1 | CTG | | 33 | GAG |
| 27 | E51SaCas9KKH | TCATTTTTTCTCATACCTT | 60 | E51SaCas9KKH | TTGATCAAGTTATAAAATC |
| | 1 | CTG | | 34 | ACA |
| 27 | E51SaCas9KKH | TCATTTTTTCTCATACCTT | 61 | E51SaCas9KKH | CTTTCTCTGCTTGATCAAG |
| | 1 | CTG | | 35 | TTA |
| 27 | E51SaCas9KKH | TCATTTTTTCTCATACCTT | 62 | E51SaCas9KKH | CCGACTGGCTTTCTCTGCT |
| | 1 | CTG | | 36 | TGA |
| 27 | E51SaCas9KKH | TCATTTTTTCTCATACCTT | 63 | E51SaCas9KKH | ACTTACCGACTGGCTTTCT |
| | 1 | CTG | | 37 | CTG |
| 27 | E51SaCas9KKH | TCATTTTTTCTCATACCTT | 64 | E51SaCas9KKH | GATGTTGGAGGTACCTGCT |
| | 1 | CTG | | 38 | CTG |
| 27 | E51SaCas9KKH | TCATTTTTTCTCATACCTT | 65 | E51SaCas9KKH | AAATGCCATCTTCCTTGAT |
| | 1 | CTG | | 39 | GTT |
| 27 | E51SaCas9KKH | TCATTTTTTCTCATACCTT | 66 | E51SaCas9KKH | CCAAACTAGAAATGCCATC |
| | 1 | CTG | | 40 | TTC |
| 27 | E51SaCas9KKH | TCATTTTTTCTCATACCTT | 67 | E51SaCas9KKH | AGGAAACTGCCATCTCCAA |
| | 1 | CTG | | 41 | ACT |
| 27 | E51SaCas9KKH | TCATTTTTTCTCATACCTT | 68 | E51SaCas9KKH | CTGTTACTCTGGTGACACA |
| | 1 | CTG | | 42 | ACC |
| 27 | E51SaCas9KKH | TCATTTTTTCTCATACCTT | 69 | E51SaCas9KKH | TAGCTCCTACTCAGACTGT |
| | 1 | CTG | | 43 | TAC |
| 28 | E51SaCas9KKH | TTTTTTCTCATACCTTCTG | 29 | E51SaCas9KKH | CCTTCTGCTTGATGATCAT |
| | 2 | CTT | | 3 | CTC |
| 28 | E51SaCas9KKH | TTTTTTCTCATACCTTCTG | 30 | E51SaCas9KKH | ATGATCATCTCGTTGATAT |
| | 2 | CTT | | 4 | CCT |
| 28 | E51SaCas9KKH | TTTTTTCTCATACCTTCTG | 31 | E51SaCas9KKH | AAGGTCACCCACCATCACC |
| | 2 | CTT | | 5 | CTC |
| 28 | E51SaCas9KKH | TTTTTTCTCATACCTTCTG | 32 | E51SaCas9KKH | ATCACCCTCTGTGATTTTA |
| | 2 | CTT | | 6 | TAA |
| 28 | E51SaCas9KKH | TTTTTTCTCATACCTTCTG | 33 | E51SaCas9KKH | ATAACTTGATCAAGCAGAG |
| | 2 | CTT | | 7 | AAA |
| 28 | E51SaCas9KKH | TTTTTTCTCATACCTTCTG | 34 | E51SaCas9KKH | CTTGATCAAGCAGAGAAAG |
| | 2 | CTT | | 8 | CCA |
| 28 | E51SaCas9KKH | TTTTTTCTCATACCTTCTG | 35 | E51SaCas9KKH | ATCAAGCAGAGAAAGCCAG |
| | 2 | CTT | | 9 | TCG |
| 28 | E51SaCas9KKH | TTTTTTCTCATACCTTCTG | 36 | E51SaCas9KKH | CAGTCGGTAAGTTCTGTCC |
| | 2 | CTT | | 10 | AAG |
| 28 | E51SaCas9KKH | TTTTTTCTCATACCTTCTG | 37 | E51SaCas9KKH | GTAAGTTCTGTCCAAGCCC |
| | 2 | CTT | | 11 | GGT |
| 28 | E51SaCas9KKH | TTTTTTCTCATACCTTCTG | 38 | E51SaCas9KKH | AGCCCGGTTGAAATCTGCC |
| | 2 | CTT | | 12 | AGA |
| 28 | E51SaCas9KKH | TTTTTTCTCATACCTTCTG | 39 | E51SaCas9KKH | AGCAGGTACCTCCAACATC |
| | 2 | CTT | | 13 | AAG |
| 28 | E51SaCas9KKH | TTTTTTCTCATACCTTCTG | 40 | E51SaCas9KKH | CAACATCAAGGAAGATGGC |
| | 2 | CTT | | 14 | ATT |
| 28 | E51SaCas9KKH | TTTTTTCTCATACCTTCTG | 41 | E51SaCas9KKH | AGGAAGATGGCATTTCTAG |
| | 2 | CTT | | 15 | TTT |
| 28 | E51SaCas9KKH | TTTTTTCTCATACCTTCTG | 42 | E51SaCas9KKH | ATGGCATTTCTAGTTTGGA |
| | 2 | CTT | | 16 | GAT |
| 28 | E51SaCas9KKH | TTTTTTCTCATACCTTCTG | 43 | E51SaCas9KKH | CTAGTTTGGAGATGGCAGT |
| | 2 | CTT | | 17 | TTC |
| 28 | E51SaCas9KKH | TTTTTTCTCATACCTTCTG | 44 | E51SaCas9KKH | GATGGCAGTTTCCTTAGTA |
| | 2 | CTT | | 18 | ACC |
| 28 | E51SaCas9KKH | TTTTTTCTCATACCTTCTG | 45 | E51SaCas9KKH | TAGTAACCACAGGTTGTGT |
| | 2 | CTT | | 19 | CAC |
| 28 | E51SaCas9KKH | TTTTTTCTCATACCTTCTG | 46 | E51SaCas9KKH | CCACAGGTTGTGTCACCAG |
| | 2 | CTT | | 20 | AGT |
| 28 | E51SaCas9KKH | TTTTTTCTCATACCTTCTG | 47 | E51SaCas9KKH | GTTGTGTCACCAGAGTAAC |
| | 2 | CTT | | 21 | AGT |
| 28 | E51SaCas9KKH | TTTTTTCTCATACCTTCTG | 48 | E51SaCas9KKH | GAGTAACAGTCTGAGTAGG |
| | 2 | CTT | | 22 | AGC |
| 28 | E51SaCas9KKH | TTTTTTCTCATACCTTCTG | 53 | E51SaCas9KKH | TCAACGAGATGATCATCAA |
| | 2 | CTT | | 27 | GCA |
| 28 | E51SaCas9KKH | TTTTTTCTCATACCTTCTG | 54 | E51SaCas9KKH | GTGACCTTGAGGATATCAA |
| | 2 | CTT | | 28 | CGA |
| 28 | E51SaCas9KKH | TTTTTTCTCATACCTTCTG | 55 | E51SaCas9KKH | TGGGTGACCTTGAGGATAT |
| | 2 | CTT | | 29 | CAA |
| 28 | E51SaCas9KKH | TTTTTTCTCATACCTTCTG | 56 | E51SaCas9KKH | GAGGGTGATGGTGGGTGAC |
| | 2 | CTT | | 30 | CTT |
| 28 | E51SaCas9KKH | TTTTTTCTCATACCTTCTG | 57 | E51SaCas9KKH | TATAAAATCACAGAGGGTG |
| | 2 | CTT | | 31 | ATG |
| 28 | E51SaCas9KKH | TTTTTTCTCATACCTTCTG | 58 | E51SaCas9KKH | AAGTTATAAAATCACAGAG |
| | 2 | CTT | | 32 | GGT |
| 28 | E51SaCas9KKH | TTTTTTCTCATACCTTCTG | 59 | E51SaCas9KKH | ATCAAGTTATAAAATCACA |
| | 2 | CTT | | 33 | GAG |
| 28 | E51SaCas9KKH | TTTTTTCTCATACCTTCTG | 60 | E51SaCas9KKH | TTGATCAAGTTATAAAATC |
| | 2 | CTT | | 34 | ACA |
| 28 | E51SaCas9KKH | TTTTTTCTCATACCTTCTG | 61 | E51SaCas9KKH | CTTTCTCTGCTTGATCAAG |
| | 2 | CTT | | 35 | TTA |
| 28 | E51SaCas9KKH | TTTTTTCTCATACCTTCTG | 62 | E51SaCas9KKH | CCGACTGGCTTTCTCTGCT |
| | 2 | CTT | | 36 | TGA |
| 28 | E51SaCas9KKH | TTTTTTCTCATACCTTCTG | 63 | E51SaCas9KKH | ACTTACCGACTGGCTTTCT |
| | 2 | CTT | | 37 | CTG |
| 28 | E51SaCas9KKH | TTTTTTCTCATACCTTCTG | 64 | E51SaCas9KKH | GATGTTGGAGGTACCTGCT |
| | 2 | CTT | | 38 | CTG |
| 28 | E51SaCas9KKH | TTTTTTCTCATACCTTCTG | 65 | E51SaCas9KKH | AAATGCCATCTTCCTTGAT |
| | 2 | CTT | | 39 | GTT |
| 28 | E51SaCas9KKH | TTTTTTCTCATACCTTCTG | 66 | E51SaCas9KKH | CCAAACTAGAAATGCCATC |
| | 2 | CTT | | 40 | TTC |
| 28 | E51SaCas9KKH | TTTTTTCTCATACCTTCTG | 67 | E51SaCas9KKH | AGGAAACTGCCATCTCCAA |
| | 2 | CTT | | 41 | ACT |
| 28 | E51SaCas9KKH | TTTTTTCTCATACCTTCTG | 68 | E51SaCas9KKH | CTGTTACTCTGGTGACACA |
| | 2 | CTT | | 42 | ACC |
| 28 | E51SaCas9KKH | TTTTTTCTCATACCTTCTG | 69 | E51SaCas9KKH | TAGCTCCTACTCAGACTGT |
| | 2 | CTT | | 43 | TAC |
| 29 | E51SaCas9KKH | CCTTCTGCTTGATGATCAT | 30 | E51SaCas9KKH | ATGATCATCTCGTTGATAT |
| | 3 | CTC | | 4 | CCT |
| 29 | E51SaCas9KKH | CCTTCTGCTTGATGATCAT | 31 | E51SaCas9KKH | AAGGTCACCCACCATCACC |
| | 3 | CTC | | 5 | CTC |
| 29 | E51SaCas9KKH | CCTTCTGCTTGATGATCAT | 32 | E51SaCas9KKH | ATCACCCTCTGTGATTTTA |
| | 3 | CTC | | 6 | TAA |
| 29 | E51SaCas9KKH | CCTTCTGCTTGATGATCAT | 33 | E51SaCas9KKH | ATAACTTGATCAAGCAGAG |
| | 3 | CTC | | 7 | AAA |
| 29 | E51SaCas9KKH | CCTTCTGCTTGATGATCAT | 34 | E51SaCas9KKH | CTTGATCAAGCAGAGAAAG |
| | 3 | CTC | | 8 | CCA |
| 29 | E51SaCas9KKH | CCTTCTGCTTGATGATCAT | 35 | E51SaCas9KKH | ATCAAGCAGAGAAAGCCAG |
| | 3 | CTC | | 9 | TCG |
| 29 | E51SaCas9KKH | CCTTCTGCTTGATGATCAT | 36 | E51SaCas9KKH | CAGTCGGTAAGTTCTGTCC |
| | 3 | CTC | | 10 | AAG |
| 29 | E51SaCas9KKH | CCTTCTGCTTGATGATCAT | 37 | E51SaCas9KKH | GTAAGTTCTGTCCAAGCCC |
| | 3 | CTC | | 11 | GGT |
| 29 | E51SaCas9KKH | CCTTCTGCTTGATGATCAT | 38 | E51SaCas9KKH | AGCCCGGTTGAAATCTGCC |
| | 3 | CTC | | 12 | AGA |
| 29 | E51SaCas9KKH | CCTTCTGCTTGATGATCAT | 39 | E51SaCas9KKH | AGCAGGTACCTCCAACATC |
| | 3 | CTC | | 13 | AAG |
| 29 | E51SaCas9KKH | CCTTCTGCTTGATGATCAT | 40 | E51SaCas9KKH | CAACATCAAGGAAGATGGC |
| | 3 | CTC | | 14 | ATT |
| 29 | E51SaCas9KKH | CCTTCTGCTTGATGATCAT | 41 | E51SaCas9KKH | AGGAAGATGGCATTTCTAG |
| | 3 | CTC | | 15 | TTT |
| 29 | E51SaCas9KKH | CCTTCTGCTTGATGATCAT | 42 | E51SaCas9KKH | ATGGCATTTCTAGTTTGGA |
| | 3 | CTC | | 16 | GAT |
| 29 | E51SaCas9KKH | CCTTCTGCTTGATGATCAT | 43 | E51SaCas9KKH | CTAGTTTGGAGATGGCAGT |
| | 3 | CTC | | 17 | TTC |
| 29 | E51SaCas9KKH | CCTTCTGCTTGATGATCAT | 44 | E51SaCas9KKH | GATGGCAGTTTCCTTAGTA |
| | 3 | CTC | | 18 | ACC |
| 29 | E51SaCas9KKH | CCTTCTGCTTGATGATCAT | 45 | E51SaCas9KKH | TAGTAACCACAGGTTGTGT |
| | 3 | CTC | | 19 | CAC |
| 29 | E51SaCas9KKH | CCTTCTGCTTGATGATCAT | 46 | E51SaCas9KKH | CCACAGGTTGTGTCACCAG |
| | 3 | CTC | | 20 | AGT |
| 29 | E51SaCas9KKH | CCTTCTGCTTGATGATCAT | 47 | E51SaCas9KKH | GTTGTGTCACCAGAGTAAC |
| | 3 | CTC | | 21 | AGT |
| 29 | E51SaCas9KKH | CCTTCTGCTTGATGATCAT | 48 | E51SaCas9KKH | GAGTAACAGTCTGAGTAGG |
| | 3 | CTC | | 22 | AGC |
| 29 | E51SaCas9KKH | CCTTCTGCTTGATGATCAT | 53 | E51SaCas9KKH | TCAACGAGATGATCATCAA |
| | 3 | CTC | | 27 | GCA |
| 29 | E51SaCas9KKH | CCTTCTGCTTGATGATCAT | 54 | E51SaCas9KKH | GTGACCTTGAGGATATCAA |
| | 3 | CTC | | 28 | CGA |
| 29 | E51SaCas9KKH | CCTTCTGCTTGATGATCAT | 55 | E51SaCas9KKH | TGGGTGACCTTGAGGATAT |
| | 3 | CTC | | 29 | CAA |
| 29 | E51SaCas9KKH | CCTTCTGCTTGATGATCAT | 56 | E51SaCas9KKH | GAGGGTGATGGTGGGTGAC |
| | 3 | CTC | | 30 | CTT |
| 29 | E51SaCas9KKH | CCTTCTGCTTGATGATCAT | 57 | E51SaCas9KKH | TATAAAATCACAGAGGGTG |
| | 3 | CTC | | 31 | ATG |
| 29 | E51SaCas9KKH | CCTTCTGCTTGATGATCAT | 58 | E51SaCas9KKH | AAGTTATAAAATCACAGAG |
| | 3 | CTC | | 32 | GGT |
| 29 | E51SaCas9KKH | CCTTCTGCTTGATGATCAT | 59 | E51SaCas9KKH | ATCAAGTTATAAAATCACA |
| | 3 | CTC | | 33 | GAG |
| 29 | E51SaCas9KKH | CCTTCTGCTTGATGATCAT | 60 | E51SaCas9KKH | TTGATCAAGTTATAAAATC |
| | 3 | CTC | | 34 | ACA |
| 29 | E51SaCas9KKH | CCTTCTGCTTGATGATCAT | 61 | E51SaCas9KKH | CTTTCTCTGCTTGATCAAG |
| | 3 | CTC | | 35 | TTA |
| 29 | E51SaCas9KKH | CCTTCTGCTTGATGATCAT | 62 | E51SaCas9KKH | CCGACTGGCTTTCTCTGCT |
| | 3 | CTC | | 36 | TGA |
| 29 | E51SaCas9KKH | CCTTCTGCTTGATGATCAT | 63 | E51SaCas9KKH | ACTTACCGACTGGCTTTCT |
| | 3 | CTC | | 37 | CTG |
| 29 | E51SaCas9KKH | CCTTCTGCTTGATGATCAT | 64 | E51SaCas9KKH | GATGTTGGAGGTACCTGCT |
| | 3 | CTC | | 38 | CTG |
| 29 | E51SaCas9KKH | CCTTCTGCTTGATGATCAT | 65 | E51SaCas9KKH | AAATGCCATCTTCCTTGAT |
| | 3 | CTC | | 39 | GTT |
| 29 | E51SaCas9KKH | CCTTCTGCTTGATGATCAT | 66 | E51SaCas9KKH | CCAAACTAGAAATGCCATC |
| | 3 | CTC | | 40 | TTC |
| 29 | E51SaCas9KKH | CCTTCTGCTTGATGATCAT | 67 | E51SaCas9KKH | AGGAAACTGCCATCTCCAA |
| | 3 | CTC | | 41 | ACT |
| 29 | E51SaCas9KKH | CCTTCTGCTTGATGATCAT | 68 | E51SaCas9KKH | CTGTTACTCTGGTGACACA |
| | 3 | CTC | | 42 | ACC |
| 29 | E51SaCas9KKH | CCTTCTGCTTGATGATCAT | 69 | E51SaCas9KKH | TAGCTCCTACTCAGACTGT |
| | 3 | CTC | | 43 | TAC |
| 30 | E51SaCas9KKH | ATGATCATCTCGTTGATAT | 31 | E51SaCas9KKH | AAGGTCACCCACCATCACC |
| | 4 | CCT | | 5 | CTC |
| 30 | E51SaCas9KKH | ATGATCATCTCGTTGATAT | 32 | E51SaCas9KKH | ATCACCCTCTGTGATTTTA |
| | 4 | CCT | | 6 | TAA |
| 30 | E51SaCas9KKH | ATGATCATCTCGTTGATAT | 33 | E51SaCas9KKH | ATAACTTGATCAAGCAGAG |
| | 4 | CCT | | 7 | AAA |
| 30 | E51SaCas9KKH | ATGATCATCTCGTTGATAT | 34 | E51SaCas9KKH | CTTGATCAAGCAGAGAAAG |
| | 4 | CCT | | 8 | CCA |
| 30 | E51SaCas9KKH | ATGATCATCTCGTTGATAT | 35 | E51SaCas9KKH | ATCAAGCAGAGAAAGCCAG |
| | 4 | CCT | | 9 | TCG |
| 30 | E51SaCas9KKH | ATGATCATCTCGTTGATAT | 36 | E51SaCas9KKH | CAGTCGGTAAGTTCTGTCC |
| | 4 | CCT | | 10 | AAG |
| 30 | E51SaCas9KKH | ATGATCATCTCGTTGATAT | 37 | E51SaCas9KKH | GTAAGTTCTGTCCAAGCCC |
| | 4 | CCT | | 11 | GGT |
| 30 | E51SaCas9KKH | ATGATCATCTCGTTGATAT | 38 | E51SaCas9KKH | AGCCCGGTTGAAATCTGCC |
| | 4 | CCT | | 12 | AGA |
| 30 | E51SaCas9KKH | ATGATCATCTCGTTGATAT | 39 | E51SaCas9KKH | AGCAGGTACCTCCAACATC |
| | 4 | CCT | | 13 | AAG |
| 30 | E51SaCas9KKH | ATGATCATCTCGTTGATAT | 40 | E51SaCas9KKH | CAACATCAAGGAAGATGGC |
| | 4 | CCT | | 14 | ATT |
| 30 | E51SaCas9KKH | ATGATCATCTCGTTGATAT | 41 | E51SaCas9KKH | AGGAAGATGGCATTTCTAG |
| | 4 | CCT | | 15 | TTT |
| 30 | E51SaCas9KKH | ATGATCATCTCGTTGATAT | 42 | E51SaCas9KKH | ATGGCATTTCTAGTTTGGA |
| | 4 | CCT | | 16 | GAT |
| 30 | E51SaCas9KKH | ATGATCATCTCGTTGATAT | 43 | E51SaCas9KKH | CTAGTTTGGAGATGGCAGT |
| | 4 | CCT | | 17 | TTC |
| 30 | E51SaCas9KKH | ATGATCATCTCGTTGATAT | 44 | E51SaCas9KKH | GATGGCAGTTTCCTTAGTA |
| | 4 | CCT | | 18 | ACC |
| 30 | E51SaCas9KKH | ATGATCATCTCGTTGATAT | 45 | E51SaCas9KKH | TAGTAACCACAGGTTGTGT |
| | 4 | CCT | | 19 | CAC |
| 30 | E51SaCas9KKH | ATGATCATCTCGTTGATAT | 46 | E51SaCas9KKH | CCACAGGTTGTGTCACCAG |
| | 4 | CCT | | 20 | AGT |
| 30 | E51SaCas9KKH | ATGATCATCTCGTTGATAT | 47 | E51SaCas9KKH | GTTGTGTCACCAGAGTAAC |
| | 4 | CCT | | 21 | AGT |
| 30 | E51SaCas9KKH | ATGATCATCTCGTTGATAT | 48 | E51SaCas9KKH | GAGTAACAGTCTGAGTAGG |
| | 4 | CCT | | 22 | AGC |
| 30 | E51SaCas9KKH | ATGATCATCTCGTTGATAT | 53 | E51SaCas9KKH | TCAACGAGATGATCATCAA |
| | 4 | CCT | | 27 | GCA |
| 30 | E51SaCas9KKH | ATGATCATCTCGTTGATAT | 54 | E51SaCas9KKH | GTGACCTTGAGGATATCAA |
| | 4 | CCT | | 28 | CGA |
| 30 | E51SaCas9KKH | ATGATCATCTCGTTGATAT | 55 | E51SaCas9KKH | TGGGTGACCTTGAGGATAT |
| | 4 | CCT | | 29 | CAA |
| 30 | E51SaCas9KKH | ATGATCATCTCGTTGATAT | 56 | E51SaCas9KKH | GAGGGTGATGGTGGGTGAC |
| | 4 | CCT | | 30 | CTT |
| 30 | E51SaCas9KKH | ATGATCATCTCGTTGATAT | 57 | E51SaCas9KKH | TATAAAATCACAGAGGGTG |
| | 4 | CCT | | 31 | ATG |
| 30 | E51SaCas9KKH | ATGATCATCTCGTTGATAT | 58 | E51SaCas9KKH | AAGTTATAAAATCACAGAG |
| | 4 | CCT | | 32 | GGT |
| 30 | E51SaCas9KKH | ATGATCATCTCGTTGATAT | 59 | E51SaCas9KKH | ATCAAGTTATAAAATCACA |
| | 4 | CCT | | 33 | GAG |
| 30 | E51SaCas9KKH | ATGATCATCTCGTTGATAT | 60 | E51SaCas9KKH | TTGATCAAGTTATAAAATC |
| | 4 | CCT | | 34 | ACA |
| 30 | E51SaCas9KKH | ATGATCATCTCGTTGATAT | 61 | E51SaCas9KKH | CTTTCTCTGCTTGATCAAG |
| | 4 | CCT | | 35 | TTA |
| 30 | E51SaCas9KKH | ATGATCATCTCGTTGATAT | 62 | E51SaCas9KKH | CCGACTGGCTTTCTCTGCT |
| | 4 | CCT | | 36 | TGA |
| 30 | E51SaCas9KKH | ATGATCATCTCGTTGATAT | 63 | E51SaCas9KKH | ACTTACCGACTGGCTTTCT |
| | 4 | CCT | | 37 | CTG |
| 30 | E51SaCas9KKH | ATGATCATCTCGTTGATAT | 64 | E51SaCas9KKH | GATGTTGGAGGTACCTGCT |
| | 4 | CCT | | 38 | CTG |
| 30 | E51SaCas9KKH | ATGATCATCTCGTTGATAT | 65 | E51SaCas9KKH | AAATGCCATCTTCCTTGAT |
| | 4 | CCT | | 39 | GTT |
| 30 | E51SaCas9KKH | ATGATCATCTCGTTGATAT | 66 | E51SaCas9KKH | CCAAACTAGAAATGCCATC |
| | 4 | CCT | | 40 | TTC |
| 30 | E51SaCas9KKH | ATGATCATCTCGTTGATAT | 67 | E51SaCas9KKH | AGGAAACTGCCATCTCCAA |
| | 4 | CCT | | 41 | ACT |
| 30 | E51SaCas9KKH | ATGATCATCTCGTTGATAT | 68 | E51SaCas9KKH | CTGTTACTCTGGTGACACA |
| | 4 | CCT | | 42 | ACC |
| 30 | E51SaCas9KKH | ATGATCATCTCGTTGATAT | 69 | E51SaCas9KKH | TAGCTCCTACTCAGACTGT |
| | 4 | CCT | | 43 | TAC |
| 31 | E51SaCas9KKH | AAGGTCACCCACCATCACC | 32 | E51SaCas9KKH | ATCACCCTCTGTGATTTTA |
| | 5 | CTC | | 6 | TAA |
| 31 | E51SaCas9KKH | AAGGTCACCCACCATCACC | 33 | E51SaCas9KKH | ATAACTTGATCAAGCAGAG |
| | 5 | CTC | | 7 | AAA |
| 31 | E51SaCas9KKH | AAGGTCACCCACCATCACC | 34 | E51SaCas9KKH | CTTGATCAAGCAGAGAAAG |
| | 5 | CTC | | 8 | CCA |
| 31 | E51SaCas9KKH | AAGGTCACCCACCATCACC | 35 | E51SaCas9KKH | ATCAAGCAGAGAAAGCCAG |
| | 5 | CTC | | 9 | TCG |
| 31 | E51SaCas9KKH | AAGGTCACCCACCATCACC | 36 | E51SaCas9KKH | CAGTCGGTAAGTTCTGTCC |
| | 5 | CTC | | 10 | AAG |
| 31 | E51SaCas9KKH | AAGGTCACCCACCATCACC | 37 | E51SaCas9KKH | GTAAGTTCTGTCCAAGCCC |
| | 5 | CTC | | 11 | GGT |
| 31 | E51SaCas9KKH | AAGGTCACCCACCATCACC | 38 | E51SaCas9KKH | AGCCCGGTTGAAATCTGCC |
| | 5 | CTC | | 12 | AGA |
| 31 | E51SaCas9KKH | AAGGTCACCCACCATCACC | 39 | E51SaCas9KKH | AGCAGGTACCTCCAACATC |
| | 5 | CTC | | 13 | AAG |
| 31 | E51SaCas9KKH | AAGGTCACCCACCATCACC | 40 | E51SaCas9KKH | CAACATCAAGGAAGATGGC |
| | 5 | CTC | | 14 | ATT |
| 31 | E51SaCas9KKH | AAGGTCACCCACCATCACC | 41 | E51SaCas9KKH | AGGAAGATGGCATTTCTAG |
| | 5 | CTC | | 15 | TTT |
| 31 | E51SaCas9KKH | AAGGTCACCCACCATCACC | 42 | E51SaCas9KKH | ATGGCATTTCTAGTTTGGA |
| | 5 | CTC | | 16 | GAT |
| 31 | E51SaCas9KKH | AAGGTCACCCACCATCACC | 43 | E51SaCas9KKH | CTAGTTTGGAGATGGCAGT |
| | 5 | CTC | | 17 | TTC |
| 31 | E51SaCas9KKH | AAGGTCACCCACCATCACC | 44 | E51SaCas9KKH | GATGGCAGTTTCCTTAGTA |
| | 5 | CTC | | 18 | ACC |
| 31 | E51SaCas9KKH | AAGGTCACCCACCATCACC | 45 | E51SaCas9KKH | TAGTAACCACAGGTTGTGT |
| | 5 | CTC | | 19 | CAC |
| 31 | E51SaCas9KKH | AAGGTCACCCACCATCACC | 46 | E51SaCas9KKH | CCACAGGTTGTGTCACCAG |
| | 5 | CTC | | 20 | AGT |
| 31 | E51SaCas9KKH | AAGGTCACCCACCATCACC | 47 | E51SaCas9KKH | GTTGTGTCACCAGAGTAAC |
| | 5 | CTC | | 21 | AGT |
| 31 | E51SaCas9KKH | AAGGTCACCCACCATCACC | 48 | E51SaCas9KKH | GAGTAACAGTCTGAGTAGG |
| | 5 | CTC | | 22 | AGC |
| 31 | E51SaCas9KKH | AAGGTCACCCACCATCACC | 53 | E51SaCas9KKH | TCAACGAGATGATCATCAA |
| | 5 | CTC | | 27 | GCA |
| 31 | E51SaCas9KKH | AAGGTCACCCACCATCACC | 54 | E51SaCas9KKH | GTGACCTTGAGGATATCAA |
| | 5 | CTC | | 28 | CGA |
| 31 | E51SaCas9KKH | AAGGTCACCCACCATCACC | 55 | E51SaCas9KKH | TGGGTGACCTTGAGGATAT |
| | 5 | CTC | | 29 | CAA |
| 31 | E51SaCas9KKH | AAGGTCACCCACCATCACC | 56 | E51SaCas9KKH | GAGGGTGATGGTGGGTGAC |
| | 5 | CTC | | 30 | CTT |
| 31 | E51SaCas9KKH | AAGGTCACCCACCATCACC | 57 | E51SaCas9KKH | TATAAAATCACAGAGGGTG |
| | 5 | CTC | | 31 | ATG |
| 31 | E51SaCas9KKH | AAGGTCACCCACCATCACC | 58 | E51SaCas9KKH | AAGTTATAAAATCACAGAG |
| | 5 | CTC | | 32 | GGT |
| 31 | E51SaCas9KKH | AAGGTCACCCACCATCACC | 59 | E51SaCas9KKH | ATCAAGTTATAAAATCACA |
| | 5 | CTC | | 33 | GAG |
| 31 | E51SaCas9KKH | AAGGTCACCCACCATCACC | 60 | E51SaCas9KKH | TTGATCAAGTTATAAAATC |
| | 5 | CTC | | 34 | ACA |
| 31 | E51SaCas9KKH | AAGGTCACCCACCATCACC | 61 | E51SaCas9KKH | CTTTCTCTGCTTGATCAAG |
| | 5 | CTC | | 35 | TTA |
| 31 | E51SaCas9KKH | AAGGTCACCCACCATCACC | 62 | E51SaCas9KKH | CCGACTGGCTTTCTCTGCT |
| | 5 | CTC | | 36 | TGA |
| 31 | E51SaCas9KKH | AAGGTCACCCACCATCACC | 63 | E51SaCas9KKH | ACTTACCGACTGGCTTTCT |
| | 5 | CTC | | 37 | CTG |
| 31 | E51SaCas9KKH | AAGGTCACCCACCATCACC | 64 | E51SaCas9KKH | GATGTTGGAGGTACCTGCT |
| | 5 | CTC | | 38 | CTG |
| 31 | E51SaCas9KKH | AAGGTCACCCACCATCACC | 65 | E51SaCas9KKH | AAATGCCATCTTCCTTGAT |
| | 5 | CTC | | 39 | GTT |
| 31 | E51SaCas9KKH | AAGGTCACCCACCATCACC | 66 | E51SaCas9KKH | CCAAACTAGAAATGCCATC |
| | 5 | CTC | | 40 | TTC |
| 31 | E51SaCas9KKH | AAGGTCACCCACCATCACC | 67 | E51SaCas9KKH | AGGAAACTGCCATCTCCAA |
| | 5 | CTC | | 41 | ACT |
| 31 | E51SaCas9KKH | AAGGTCACCCACCATCACC | 68 | E51SaCas9KKH | CTGTTACTCTGGTGACACA |
| | 5 | CTC | | 42 | ACC |
| 31 | E51SaCas9KKH | AAGGTCACCCACCATCACC | 69 | E51SaCas9KKH | TAGCTCCTACTCAGACTGT |
| | 5 | CTC | | 43 | TAC |
| 32 | E51SaCas9KKH | ATCACCCTCTGTGATTTTA | 33 | E51SaCas9KKH | ATAACTTGATCAAGCAGAG |
| | 6 | TAA | | 7 | AAA |
| 32 | E51SaCas9KKH | ATCACCCTCTGTGATTTTA | 34 | E51SaCas9KKH | CTTGATCAAGCAGAGAAAG |
| | 6 | TAA | | 8 | CCA |
| 32 | E51SaCas9KKH | ATCACCCTCTGTGATTTTA | 35 | E51SaCas9KKH | ATCAAGCAGAGAAAGCCAG |
| | 6 | TAA | | 9 | TCG |
| 32 | E51SaCas9KKH | ATCACCCTCTGTGATTTTA | 36 | E51SaCas9KKH | CAGTCGGTAAGTTCTGTCC |
| | 6 | TAA | | 10 | AAG |
| 32 | E51SaCas9KKH | ATCACCCTCTGTGATTTTA | 37 | E51SaCas9KKH | GTAAGTTCTGTCCAAGCCC |
| | 6 | TAA | | 11 | GGT |
| 32 | E51SaCas9KKH | ATCACCCTCTGTGATTTTA | 38 | E51SaCas9KKH | AGCCCGGTTGAAATCTGCC |
| | 6 | TAA | | 12 | AGA |
| 32 | E51SaCas9KKH | ATCACCCTCTGTGATTTTA | 39 | E51SaCas9KKH | AGCAGGTACCTCCAACATC |
| | 6 | TAA | | 13 | AAG |
| 32 | E51SaCas9KKH | ATCACCCTCTGTGATTTTA | 40 | E51SaCas9KKH | CAACATCAAGGAAGATGGC |
| | 6 | TAA | | 14 | ATT |
| 32 | E51SaCas9KKH | ATCACCCTCTGTGATTTTA | 41 | E51SaCas9KKH | AGGAAGATGGCATTTCTAG |
| | 6 | TAA | | 15 | TTT |
| 32 | E51SaCas9KKH | ATCACCCTCTGTGATTTTA | 42 | E51SaCas9KKH | ATGGCATTTCTAGTTTGGA |
| | 6 | TAA | | 16 | GAT |
| 32 | E51SaCas9KKH | ATCACCCTCTGTGATTTTA | 43 | E51SaCas9KKH | CTAGTTTGGAGATGGCAGT |
| | 6 | TAA | | 17 | TTC |
| 32 | E51SaCas9KKH | ATCACCCTCTGTGATTTTA | 44 | E51SaCas9KKH | GATGGCAGTTTCCTTAGTA |
| | 6 | TAA | | 18 | ACC |
| 32 | E51SaCas9KKH | ATCACCCTCTGTGATTTTA | 45 | E51SaCas9KKH | TAGTAACCACAGGTTGTGT |
| | 6 | TAA | | 19 | CAC |
| 32 | E51SaCas9KKH | ATCACCCTCTGTGATTTTA | 46 | E51SaCas9KKH | CCACAGGTTGTGTCACCAG |
| | 6 | TAA | | 20 | AGT |
| 32 | E51SaCas9KKH | ATCACCCTCTGTGATTTTA | 47 | E51SaCas9KKH | GTTGTGTCACCAGAGTAAC |
| | 6 | TAA | | 21 | AGT |
| 32 | E51SaCas9KKH | ATCACCCTCTGTGATTTTA | 48 | E51SaCas9KKH | GAGTAACAGTCTGAGTAGG |
| | 6 | TAA | | 22 | AGC |
| 32 | E51SaCas9KKH | ATCACCCTCTGTGATTTTA | 53 | E51SaCas9KKH | TCAACGAGATGATCATCAA |
| | 6 | TAA | | 27 | GCA |
| 32 | E51SaCas9KKH | ATCACCCTCTGTGATTTTA | 54 | E51SaCas9KKH | GTGACCTTGAGGATATCAA |
| | 6 | TAA | | 28 | CGA |
| 32 | E51SaCas9KKH | ATCACCCTCTGTGATTTTA | 55 | E51SaCas9KKH | TGGGTGACCTTGAGGATAT |
| | 6 | TAA | | 29 | CAA |
| 32 | E51SaCas9KKH | ATCACCCTCTGTGATTTTA | 56 | E51SaCas9KKH | GAGGGTGATGGTGGGTGAC |
| | 6 | TAA | | 30 | CTT |
| 32 | E51SaCas9KKH | ATCACCCTCTGTGATTTTA | 57 | E51SaCas9KKH | TATAAAATCACAGAGGGTG |
| | 6 | TAA | | 31 | ATG |
| 32 | E51SaCas9KKH | ATCACCCTCTGTGATTTTA | 58 | E51SaCas9KKH | AAGTTATAAAATCACAGAG |
| | 6 | TAA | | 32 | GGT |
| 32 | E51SaCas9KKH | ATCACCCTCTGTGATTTTA | 59 | E51SaCas9KKH | ATCAAGTTATAAAATCACA |
| | 6 | TAA | | 33 | GAG |
| 32 | E51SaCas9KKH | ATCACCCTCTGTGATTTTA | 60 | E51SaCas9KKH | TTGATCAAGTTATAAAATC |
| | 6 | TAA | | 34 | ACA |
| 32 | E51SaCas9KKH | ATCACCCTCTGTGATTTTA | 61 | E51SaCas9KKH | CTTTCTCTGCTTGATCAAG |
| | 6 | TAA | | 35 | TTA |
| 32 | E51SaCas9KKH | ATCACCCTCTGTGATTTTA | 62 | E51SaCas9KKH | CCGACTGGCTTTCTCTGCT |
| | 6 | TAA | | 36 | TGA |
| 32 | E51SaCas9KKH | ATCACCCTCTGTGATTTTA | 63 | E51SaCas9KKH | ACTTACCGACTGGCTTTCT |
| | 6 | TAA | | 37 | CTG |
| 32 | E51SaCas9KKH | ATCACCCTCTGTGATTTTA | 64 | E51SaCas9KKH | GATGTTGGAGGTACCTGCT |
| | 6 | TAA | | 38 | CTG |
| 32 | E51SaCas9KKH | ATCACCCTCTGTGATTTTA | 65 | E51SaCas9KKH | AAATGCCATCTTCCTTGAT |
| | 6 | TAA | | 39 | GTT |
| 32 | E51SaCas9KKH | ATCACCCTCTGTGATTTTA | 66 | E51SaCas9KKH | CCAAACTAGAAATGCCATC |
| | 6 | TAA | | 40 | TTC |
| 32 | E51SaCas9KKH | ATCACCCTCTGTGATTTTA | 67 | E51SaCas9KKH | AGGAAACTGCCATCTCCAA |
| | 6 | TAA | | 41 | ACT |
| 32 | E51SaCas9KKH | ATCACCCTCTGTGATTTTA | 68 | E51SaCas9KKH | CTGTTACTCTGGTGACACA |
| | 6 | TAA | | 42 | ACC |
| 32 | E51SaCas9KKH | ATCACCCTCTGTGATTTTA | 69 | E51SaCas9KKH | TAGCTCCTACTCAGACTGT |
| | 6 | TAA | | 43 | TAC |
| 33 | E51SaCas9KKH | ATAACTTGATCAAGCAGAG | 34 | E51SaCas9KKH | CTTGATCAAGCAGAGAAAG |
| | 7 | AAA | | 8 | CCA |
| 33 | E51SaCas9KKH | ATAACTTGATCAAGCAGAG | 35 | E51SaCas9KKH | ATCAAGCAGAGAAAGCCAG |
| | 7 | AAA | | 9 | TCG |
| 33 | E51SaCas9KKH | ATAACTTGATCAAGCAGAG | 36 | E51SaCas9KKH | CAGTCGGTAAGTTCTGTCC |
| | 7 | AAA | | 10 | AAG |
| 33 | E51SaCas9KKH | ATAACTTGATCAAGCAGAG | 37 | E51SaCas9KKH | GTAAGTTCTGTCCAAGCCC |
| | 7 | AAA | | 11 | GGT |
| 33 | E51SaCas9KKH | ATAACTTGATCAAGCAGAG | 38 | E51SaCas9KKH | AGCCCGGTTGAAATCTGCC |
| | 7 | AAA | | 12 | AGA |
| 33 | E51SaCas9KKH | ATAACTTGATCAAGCAGAG | 39 | E51SaCas9KKH | AGCAGGTACCTCCAACATC |
| | 7 | AAA | | 13 | AAG |
| 33 | E51SaCas9KKH | ATAACTTGATCAAGCAGAG | 40 | E51SaCas9KKH | CAACATCAAGGAAGATGGC |
| | 7 | AAA | | 14 | ATT |
| 33 | E51SaCas9KKH | ATAACTTGATCAAGCAGAG | 41 | E51SaCas9KKH | AGGAAGATGGCATTTCTAG |
| | 7 | AAA | | 15 | TTT |
| 33 | E51SaCas9KKH | ATAACTTGATCAAGCAGAG | 42 | E51SaCas9KKH | ATGGCATTTCTAGTTTGGA |
| | 7 | AAA | | 16 | GAT |
| 33 | E51SaCas9KKH | ATAACTTGATCAAGCAGAG | 43 | E51SaCas9KKH | CTAGTTTGGAGATGGCAGT |
| | 7 | AAA | | 17 | TTC |
| 33 | E51SaCas9KKH | ATAACTTGATCAAGCAGAG | 44 | E51SaCas9KKH | GATGGCAGTTTCCTTAGTA |
| | 7 | AAA | | 18 | ACC |
| 33 | E51SaCas9KKH | ATAACTTGATCAAGCAGAG | 45 | E51SaCas9KKH | TAGTAACCACAGGTTGTGT |
| | 7 | AAA | | 19 | CAC |
| 33 | E51SaCas9KKH | ATAACTTGATCAAGCAGAG | 46 | E51SaCas9KKH | CCACAGGTTGTGTCACCAG |
| | 7 | AAA | | 20 | AGT |
| 33 | E51SaCas9KKH | ATAACTTGATCAAGCAGAG | 47 | E51SaCas9KKH | GTTGTGTCACCAGAGTAAC |
| | 7 | AAA | | 21 | AGT |
| 33 | E51SaCas9KKH | ATAACTTGATCAAGCAGAG | 48 | E51SaCas9KKH | GAGTAACAGTCTGAGTAGG |
| | 7 | AAA | | 22 | AGC |
| 33 | E51SaCas9KKH | ATAACTTGATCAAGCAGAG | 53 | E51SaCas9KKH | TCAACGAGATGATCATCAA |
| | 7 | AAA | | 27 | GCA |
| 33 | E51SaCas9KKH | ATAACTTGATCAAGCAGAG | 54 | E51SaCas9KKH | GTGACCTTGAGGATATCAA |
| | 7 | AAA | | 28 | CGA |
| 33 | E51SaCas9KKH | ATAACTTGATCAAGCAGAG | 55 | E51SaCas9KKH | TGGGTGACCTTGAGGATAT |
| | 7 | AAA | | 29 | CAA |
| 33 | E51SaCas9KKH | ATAACTTGATCAAGCAGAG | 56 | E51SaCas9KKH | GAGGGTGATGGTGGGTGAC |
| | 7 | AAA | | 30 | CTT |
| 33 | E51SaCas9KKH | ATAACTTGATCAAGCAGAG | 57 | E51SaCas9KKH | TATAAAATCACAGAGGGTG |
| | 7 | AAA | | 31 | ATG |
| 33 | E51SaCas9KKH | ATAACTTGATCAAGCAGAG | 58 | E51SaCas9KKH | AAGTTATAAAATCACAGAG |
| | 7 | AAA | | 32 | GGT |
| 33 | E51SaCas9KKH | ATAACTTGATCAAGCAGAG | 59 | E51SaCas9KKH | ATCAAGTTATAAAATCACA |
| | 7 | AAA | | 33 | GAG |
| 33 | E51SaCas9KKH | ATAACTTGATCAAGCAGAG | 60 | E51SaCas9KKH | TTGATCAAGTTATAAAATC |
| | 7 | AAA | | 34 | ACA |
| 33 | E51SaCas9KKH | ATAACTTGATCAAGCAGAG | 61 | E51SaCas9KKH | CTTTCTCTGCTTGATCAAG |
| | 7 | AAA | | 35 | TTA |
| 33 | E51SaCas9KKH | ATAACTTGATCAAGCAGAG | 62 | E51SaCas9KKH | CCGACTGGCTTTCTCTGCT |
| | 7 | AAA | | 36 | TGA |
| 33 | E51SaCas9KKH | ATAACTTGATCAAGCAGAG | 63 | E51SaCas9KKH | ACTTACCGACTGGCTTTCT |
| | 7 | AAA | | 37 | CTG |
| 33 | E51SaCas9KKH | ATAACTTGATCAAGCAGAG | 64 | E51SaCas9KKH | GATGTTGGAGGTACCTGCT |
| | 7 | AAA | | 38 | CTG |
| 33 | E51SaCas9KKH | ATAACTTGATCAAGCAGAG | 65 | E51SaCas9KKH | AAATGCCATCTTCCTTGAT |
| | 7 | AAA | | 39 | GTT |
| 33 | E51SaCas9KKH | ATAACTTGATCAAGCAGAG | 66 | E51SaCas9KKH | CCAAACTAGAAATGCCATC |
| | 7 | AAA | | 40 | TTC |
| 33 | E51SaCas9KKH | ATAACTTGATCAAGCAGAG | 67 | E51SaCas9KKH | AGGAAACTGCCATCTCCAA |
| | 7 | AAA | | 41 | ACT |
| 33 | E51SaCas9KKH | ATAACTTGATCAAGCAGAG | 68 | E51SaCas9KKH | CTGTTACTCTGGTGACACA |
| | 7 | AAA | | 42 | ACC |
| 33 | E51SaCas9KKH | ATAACTTGATCAAGCAGAG | 69 | E51SaCas9KKH | TAGCTCCTACTCAGACTGT |
| | 7 | AAA | | 43 | TAC |
| 34 | E51SaCas9KKH | CTTGATCAAGCAGAGAAAG | 35 | E51SaCas9KKH | ATCAAGCAGAGAAAGCCAG |
| | 8 | CCA | | 9 | TCG |
| 34 | E51SaCas9KKH | CTTGATCAAGCAGAGAAAG | 36 | E51SaCas9KKH | CAGTCGGTAAGTTCTGTCC |
| | 8 | CCA | | 10 | AAG |
| 34 | E51SaCas9KKH | CTTGATCAAGCAGAGAAAG | 37 | E51SaCas9KKH | GTAAGTTCTGTCCAAGCCC |
| | 8 | CCA | | 11 | GGT |
| 34 | E51SaCas9KKH | CTTGATCAAGCAGAGAAAG | 38 | E51SaCas9KKH | AGCCCGGTTGAAATCTGCC |
| | 8 | CCA | | 12 | AGA |
| 34 | E51SaCas9KKH | CTTGATCAAGCAGAGAAAG | 39 | E51SaCas9KKH | AGCAGGTACCTCCAACATC |
| | 8 | CCA | | 13 | AAG |
| 34 | E51SaCas9KKH | CTTGATCAAGCAGAGAAAG | 40 | E51SaCas9KKH | CAACATCAAGGAAGATGGC |
| | 8 | CCA | | 14 | ATT |
| 34 | E51SaCas9KKH | CTTGATCAAGCAGAGAAAG | 41 | E51SaCas9KKH | AGGAAGATGGCATTTCTAG |
| | 8 | CCA | | 15 | TTT |
| 34 | E51SaCas9KKH | CTTGATCAAGCAGAGAAAG | 42 | E51SaCas9KKH | ATGGCATTTCTAGTTTGGA |
| | 8 | CCA | | 16 | GAT |
| 34 | E51SaCas9KKH | CTTGATCAAGCAGAGAAAG | 43 | E51SaCas9KKH | CTAGTTTGGAGATGGCAGT |
| | 8 | CCA | | 17 | TTC |
| 34 | E51SaCas9KKH | CTTGATCAAGCAGAGAAAG | 44 | E51SaCas9KKH | GATGGCAGTTTCCTTAGTA |
| | 8 | CCA | | 18 | ACC |
| 34 | E51SaCas9KKH | CTTGATCAAGCAGAGAAAG | 45 | E51SaCas9KKH | TAGTAACCACAGGTTGTGT |
| | 8 | CCA | | 19 | CAC |
| 34 | E51SaCas9KKH | CTTGATCAAGCAGAGAAAG | 46 | E51SaCas9KKH | CCACAGGTTGTGTCACCAG |
| | 8 | CCA | | 20 | AGT |
| 34 | E51SaCas9KKH | CTTGATCAAGCAGAGAAAG | 47 | E51SaCas9KKH | GTTGTGTCACCAGAGTAAC |
| | 8 | CCA | | 21 | AGT |
| 34 | E51SaCas9KKH | CTTGATCAAGCAGAGAAAG | 48 | E51SaCas9KKH | GAGTAACAGTCTGAGTAGG |
| | 8 | CCA | | 22 | AGC |
| 34 | E51SaCas9KKH | CTTGATCAAGCAGAGAAAG | 53 | E51SaCas9KKH | TCAACGAGATGATCATCAA |
| | 8 | CCA | | 27 | GCA |
| 34 | E51SaCas9KKH | CTTGATCAAGCAGAGAAAG | 54 | E51SaCas9KKH | GTGACCTTGAGGATATCAA |
| | 8 | CCA | | 28 | CGA |
| 34 | E51SaCas9KKH | CTTGATCAAGCAGAGAAAG | 55 | E51SaCas9KKH | TGGGTGACCTTGAGGATAT |
| | 8 | CCA | | 29 | CAA |
| 34 | E51SaCas9KKH | CTTGATCAAGCAGAGAAAG | 56 | E51SaCas9KKH | GAGGGTGATGGTGGGTGAC |
| | 8 | CCA | | 30 | CTT |
| 34 | E51SaCas9KKH | CTTGATCAAGCAGAGAAAG | 57 | E51SaCas9KKH | TATAAAATCACAGAGGGTG |
| | 8 | CCA | | 31 | ATG |
| 34 | E51SaCas9KKH | CTTGATCAAGCAGAGAAAG | 58 | E51SaCas9KKH | AAGTTATAAAATCACAGAG |
| | 8 | CCA | | 32 | GGT |
| 34 | E51SaCas9KKH | CTTGATCAAGCAGAGAAAG | 59 | E51SaCas9KKH | ATCAAGTTATAAAATCACA |
| | 8 | CCA | | 33 | GAG |
| 34 | E51SaCas9KKH | CTTGATCAAGCAGAGAAAG | 60 | E51SaCas9KKH | TTGATCAAGTTATAAAATC |
| | 8 | CCA | | 34 | ACA |
| 34 | E51SaCas9KKH | CTTGATCAAGCAGAGAAAG | 61 | E51SaCas9KKH | CTTTCTCTGCTTGATCAAG |
| | 8 | CCA | | 35 | TTA |
| 34 | E51SaCas9KKH | CTTGATCAAGCAGAGAAAG | 62 | E51SaCas9KKH | CCGACTGGCTTTCTCTGCT |
| | 8 | CCA | | 36 | TGA |
| 34 | E51SaCas9KKH | CTTGATCAAGCAGAGAAAG | 63 | E51SaCas9KKH | ACTTACCGACTGGCTTTCT |
| | 8 | CCA | | 37 | CTG |
| 34 | E51SaCas9KKH | CTTGATCAAGCAGAGAAAG | 64 | E51SaCas9KKH | GATGTTGGAGGTACCTGCT |
| | 8 | CCA | | 38 | CTG |
| 34 | E51SaCas9KKH | CTTGATCAAGCAGAGAAAG | 65 | E51SaCas9KKH | AAATGCCATCTTCCTTGAT |
| | 8 | CCA | | 39 | GTT |
| 34 | E51SaCas9KKH | CTTGATCAAGCAGAGAAAG | 66 | E51SaCas9KKH | CCAAACTAGAAATGCCATC |
| | 8 | CCA | | 40 | TTC |
| 34 | E51SaCas9KKH | CTTGATCAAGCAGAGAAAG | 67 | E51SaCas9KKH | AGGAAACTGCCATCTCCAA |
| | 8 | CCA | | 41 | ACT |
| 34 | E51SaCas9KKH | CTTGATCAAGCAGAGAAAG | 68 | E51SaCas9KKH | CTGTTACTCTGGTGACACA |
| | 8 | CCA | | 42 | ACC |
| 34 | E51SaCas9KKH | CTTGATCAAGCAGAGAAAG | 69 | E51SaCas9KKH | TAGCTCCTACTCAGACTGT |
| | 8 | CCA | | 43 | TAC |
| 35 | E51SaCas9KKH | ATCAAGCAGAGAAAGCCAG | 36 | E51SaCas9KKH | CAGTCGGTAAGTTCTGTCC |
| | 9 | TCG | | 10 | AAG |
| 35 | E51SaCas9KKH | ATCAAGCAGAGAAAGCCAG | 37 | E51SaCas9KKH | GTAAGTTCTGTCCAAGCCC |
| | 9 | TCG | | 11 | GGT |
| 35 | E51SaCas9KKH | ATCAAGCAGAGAAAGCCAG | 38 | E51SaCas9KKH | AGCCCGGTTGAAATCTGCC |
| | 9 | TCG | | 12 | AGA |
| 35 | E51SaCas9KKH | ATCAAGCAGAGAAAGCCAG | 39 | E51SaCas9KKH | AGCAGGTACCTCCAACATC |
| | 9 | TCG | | 13 | AAG |
| 35 | E51SaCas9KKH | ATCAAGCAGAGAAAGCCAG | 40 | E51SaCas9KKH | CAACATCAAGGAAGATGGC |
| | 9 | TCG | | 14 | ATT |
| 35 | E51SaCas9KKH | ATCAAGCAGAGAAAGCCAG | 41 | E51SaCas9KKH | AGGAAGATGGCATTTCTAG |
| | 9 | TCG | | 15 | TTT |
| 35 | E51SaCas9KKH | ATCAAGCAGAGAAAGCCAG | 42 | E51SaCas9KKH | ATGGCATTTCTAGTTTGGA |
| | 9 | TCG | | 16 | GAT |
| 35 | E51SaCas9KKH | ATCAAGCAGAGAAAGCCAG | 43 | E51SaCas9KKH | CTAGTTTGGAGATGGCAGT |
| | 9 | TCG | | 17 | TTC |
| 35 | E51SaCas9KKH | ATCAAGCAGAGAAAGCCAG | 44 | E51SaCas9KKH | GATGGCAGTTTCCTTAGTA |
| | 9 | TCG | | 18 | ACC |
| 35 | E51SaCas9KKH | ATCAAGCAGAGAAAGCCAG | 45 | E51SaCas9KKH | TAGTAACCACAGGTTGTGT |
| | 9 | TCG | | 19 | CAC |
| 35 | E51SaCas9KKH | ATCAAGCAGAGAAAGCCAG | 46 | E51SaCas9KKH | CCACAGGTTGTGTCACCAG |
| | 9 | TCG | | 20 | AGT |
| 35 | E51SaCas9KKH | ATCAAGCAGAGAAAGCCAG | 47 | E51SaCas9KKH | GTTGTGTCACCAGAGTAAC |
| | 9 | TCG | | 21 | AGT |
| 35 | E51SaCas9KKH | ATCAAGCAGAGAAAGCCAG | 48 | E51SaCas9KKH | GAGTAACAGTCTGAGTAGG |
| | 9 | TCG | | 22 | AGC |
| 35 | E51SaCas9KKH | ATCAAGCAGAGAAAGCCAG | 53 | E51SaCas9KKH | TCAACGAGATGATCATCAA |
| | 9 | TCG | | 27 | GCA |
| 35 | E51SaCas9KKH | ATCAAGCAGAGAAAGCCAG | 54 | E51SaCas9KKH | GTGACCTTGAGGATATCAA |
| | 9 | TCG | | 28 | CGA |
| 35 | E51SaCas9KKH | ATCAAGCAGAGAAAGCCAG | 55 | E51SaCas9KKH | TGGGTGACCTTGAGGATAT |
| | 9 | TCG | | 29 | CAA |
| 35 | E51SaCas9KKH | ATCAAGCAGAGAAAGCCAG | 56 | E51SaCas9KKH | GAGGGTGATGGTGGGTGAC |
| | 9 | TCG | | 30 | CTT |
| 35 | E51SaCas9KKH | ATCAAGCAGAGAAAGCCAG | 57 | E51SaCas9KKH | TATAAAATCACAGAGGGTG |
| | 9 | TCG | | 31 | ATG |
| 35 | E51SaCas9KKH | ATCAAGCAGAGAAAGCCAG | 58 | E51SaCas9KKH | AAGTTATAAAATCACAGAG |
| | 9 | TCG | | 32 | GGT |
| 35 | E51SaCas9KKH | ATCAAGCAGAGAAAGCCAG | 59 | E51SaCas9KKH | ATCAAGTTATAAAATCACA |
| | 9 | TCG | | 33 | GAG |
| 35 | E51SaCas9KKH | ATCAAGCAGAGAAAGCCAG | 60 | E51SaCas9KKH | TTGATCAAGTTATAAAATC |
| | 9 | TCG | | 34 | ACA |
| 35 | E51SaCas9KKH | ATCAAGCAGAGAAAGCCAG | 61 | E51SaCas9KKH | CTTTCTCTGCTTGATCAAG |
| | 9 | TCG | | 35 | TTA |
| 35 | E51SaCas9KKH | ATCAAGCAGAGAAAGCCAG | 62 | E51SaCas9KKH | CCGACTGGCTTTCTCTGCT |
| | 9 | TCG | | 36 | TGA |
| 35 | E51SaCas9KKH | ATCAAGCAGAGAAAGCCAG | 63 | E51SaCas9KKH | ACTTACCGACTGGCTTTCT |
| | 9 | TCG | | 37 | CTG |
| 35 | E51SaCas9KKH | ATCAAGCAGAGAAAGCCAG | 64 | E51SaCas9KKH | GATGTTGGAGGTACCTGCT |
| | 9 | TCG | | 38 | CTG |
| 35 | E51SaCas9KKH | ATCAAGCAGAGAAAGCCAG | 65 | E51SaCas9KKH | AAATGCCATCTTCCTTGAT |
| | 9 | TCG | | 39 | GTT |
| 35 | E51SaCas9KKH | ATCAAGCAGAGAAAGCCAG | 66 | E51SaCas9KKH | CCAAACTAGAAATGCCATC |
| | 9 | TCG | | 40 | TTC |
| 35 | E51SaCas9KKH | ATCAAGCAGAGAAAGCCAG | 67 | E51SaCas9KKH | AGGAAACTGCCATCTCCAA |
| | 9 | TCG | | 41 | ACT |
| 35 | E51SaCas9KKH | ATCAAGCAGAGAAAGCCAG | 68 | E51SaCas9KKH | CTGTTACTCTGGTGACACA |
| | 9 | TCG | | 42 | ACC |
| 35 | E51SaCas9KKH | ATCAAGCAGAGAAAGCCAG | 69 | E51SaCas9KKH | TAGCTCCTACTCAGACTGT |
| | 9 | TCG | | 43 | TAC |
| 36 | E51SaCas9KKH | CAGTCGGTAAGTTCTGTCC | 37 | E51SaCas9KKH | GTAAGTTCTGTCCAAGCCC |
| | 10 | AAG | | 11 | GGT |
| 36 | E51SaCas9KKH | CAGTCGGTAAGTTCTGTCC | 38 | E51SaCas9KKH | AGCCCGGTTGAAATCTGCC |
| | 10 | AAG | | 12 | AGA |
| 36 | E51SaCas9KKH | CAGTCGGTAAGTTCTGTCC | 39 | E51SaCas9KKH | AGCAGGTACCTCCAACATC |
| | 10 | AAG | | 13 | AAG |
| 36 | E51SaCas9KKH | CAGTCGGTAAGTTCTGTCC | 40 | E51SaCas9KKH | CAACATCAAGGAAGATGGC |
| | 10 | AAG | | 14 | ATT |
| 36 | E51SaCas9KKH | CAGTCGGTAAGTTCTGTCC | 41 | E51SaCas9KKH | AGGAAGATGGCATTTCTAG |
| | 10 | AAG | | 15 | TTT |
| 36 | E51SaCas9KKH | CAGTCGGTAAGTTCTGTCC | 42 | E51SaCas9KKH | ATGGCATTTCTAGTTTGGA |
| | 10 | AAG | | 16 | GAT |
| 36 | E51SaCas9KKH | CAGTCGGTAAGTTCTGTCC | 43 | E51SaCas9KKH | CTAGTTTGGAGATGGCAGT |
| | 10 | AAG | | 17 | TTC |
| 36 | E51SaCas9KKH | CAGTCGGTAAGTTCTGTCC | 44 | E51SaCas9KKH | GATGGCAGTTTCCTTAGTA |
| | 10 | AAG | | 18 | ACC |
| 36 | E51SaCas9KKH | CAGTCGGTAAGTTCTGTCC | 45 | E51SaCas9KKH | TAGTAACCACAGGTTGTGT |
| | 10 | AAG | | 19 | CAC |
| 36 | E51SaCas9KKH | CAGTCGGTAAGTTCTGTCC | 46 | E51SaCas9KKH | CCACAGGTTGTGTCACCAG |
| | 10 | AAG | | 20 | AGT |
| 36 | E51SaCas9KKH | CAGTCGGTAAGTTCTGTCC | 47 | E51SaCas9KKH | GTTGTGTCACCAGAGTAAC |
| | 10 | AAG | | 21 | AGT |
| 36 | E51SaCas9KKH | CAGTCGGTAAGTTCTGTCC | 48 | E51SaCas9KKH | GAGTAACAGTCTGAGTAGG |
| | 10 | AAG | | 22 | AGC |
| 36 | E51SaCas9KKH | CAGTCGGTAAGTTCTGTCC | 53 | E51SaCas9KKH | TCAACGAGATGATCATCAA |
| | 10 | AAG | | 27 | GCA |
| 36 | E51SaCas9KKH | CAGTCGGTAAGTTCTGTCC | 54 | E51SaCas9KKH | GTGACCTTGAGGATATCAA |
| | 10 | AAG | | 28 | CGA |
| 36 | E51SaCas9KKH | CAGTCGGTAAGTTCTGTCC | 55 | E51SaCas9KKH | TGGGTGACCTTGAGGATAT |
| | 10 | AAG | | 29 | CAA |
| 36 | E51SaCas9KKH | CAGTCGGTAAGTTCTGTCC | 56 | E51SaCas9KKH | GAGGGTGATGGTGGGTGAC |
| | 10 | AAG | | 30 | CTT |
| 36 | E51SaCas9KKH | CAGTCGGTAAGTTCTGTCC | 57 | E51SaCas9KKH | TATAAAATCACAGAGGGTG |
| | 10 | AAG | | 31 | ATG |
| 36 | E51SaCas9KKH | CAGTCGGTAAGTTCTGTCC | 58 | E51SaCas9KKH | AAGTTATAAAATCACAGAG |
| | 10 | AAG | | 32 | GGT |
| 36 | E51SaCas9KKH | CAGTCGGTAAGTTCTGTCC | 59 | E51SaCas9KKH | ATCAAGTTATAAAATCACA |
| | 10 | AAG | | 33 | GAG |
| 36 | E51SaCas9KKH | CAGTCGGTAAGTTCTGTCC | 60 | E51SaCas9KKH | TTGATCAAGTTATAAAATC |
| | 10 | AAG | | 34 | ACA |
| 36 | E51SaCas9KKH | CAGTCGGTAAGTTCTGTCC | 61 | E51SaCas9KKH | CTTTCTCTGCTTGATCAAG |
| | 10 | AAG | | 35 | TTA |
| 36 | E51SaCas9KKH | CAGTCGGTAAGTTCTGTCC | 62 | E51SaCas9KKH | CCGACTGGCTTTCTCTGCT |
| | 10 | AAG | | 36 | TGA |
| 36 | E51SaCas9KKH | CAGTCGGTAAGTTCTGTCC | 63 | E51SaCas9KKH | ACTTACCGACTGGCTTTCT |
| | 10 | AAG | | 37 | CTG |
| 36 | E51SaCas9KKH | CAGTCGGTAAGTTCTGTCC | 64 | E51SaCas9KKH | GATGTTGGAGGTACCTGCT |
| | 10 | AAG | | 38 | CTG |
| 36 | E51SaCas9KKH | CAGTCGGTAAGTTCTGTCC | 65 | E51SaCas9KKH | AAATGCCATCTTCCTTGAT |
| | 10 | AAG | | 39 | GTT |
| 36 | E51SaCas9KKH | CAGTCGGTAAGTTCTGTCC | 66 | E51SaCas9KKH | CCAAACTAGAAATGCCATC |
| | 10 | AAG | | 40 | TTC |
| 36 | E51SaCas9KKH | CAGTCGGTAAGTTCTGTCC | 67 | E51SaCas9KKH | AGGAAACTGCCATCTCCAA |
| | 10 | AAG | | 41 | ACT |
| 36 | E51SaCas9KKH | CAGTCGGTAAGTTCTGTCC | 68 | E51SaCas9KKH | CTGTTACTCTGGTGACACA |
| | 10 | AAG | | 42 | ACC |
| 36 | E51SaCas9KKH | CAGTCGGTAAGTTCTGTCC | 69 | E51SaCas9KKH | TAGCTCCTACTCAGACTGT |
| | 10 | AAG | | 43 | TAC |
| 37 | E51SaCas9KKH | GTAAGTTCTGTCCAAGCCC | 38 | E51SaCas9KKH | AGCCCGGTTGAAATCTGCC |
| | 11 | GGT | | 12 | AGA |
| 37 | E51SaCas9KKH | GTAAGTTCTGTCCAAGCCC | 39 | E51SaCas9KKH | AGCAGGTACCTCCAACATC |
| | 11 | GGT | | 13 | AAG |
| 37 | E51SaCas9KKH | GTAAGTTCTGTCCAAGCCC | 40 | E51SaCas9KKH | CAACATCAAGGAAGATGGC |
| | 11 | GGT | | 14 | ATT |
| 37 | E51SaCas9KKH | GTAAGTTCTGTCCAAGCCC | 41 | E51SaCas9KKH | AGGAAGATGGCATTTCTAG |
| | 11 | GGT | | 15 | TTT |
| 37 | E51SaCas9KKH | GTAAGTTCTGTCCAAGCCC | 42 | E51SaCas9KKH | ATGGCATTTCTAGTTTGGA |
| | 11 | GGT | | 16 | GAT |
| 37 | E51SaCas9KKH | GTAAGTTCTGTCCAAGCCC | 43 | E51SaCas9KKH | CTAGTTTGGAGATGGCAGT |
| | 11 | GGT | | 17 | TTC |
| 37 | E51SaCas9KKH | GTAAGTTCTGTCCAAGCCC | 44 | E51SaCas9KKH | GATGGCAGTTTCCTTAGTA |
| | 11 | GGT | | 18 | ACC |
| 37 | E51SaCas9KKH | GTAAGTTCTGTCCAAGCCC | 45 | E51SaCas9KKH | TAGTAACCACAGGTTGTGT |
| | 11 | GGT | | 19 | CAC |
| 37 | E51SaCas9KKH | GTAAGTTCTGTCCAAGCCC | 46 | E51SaCas9KKH | CCACAGGTTGTGTCACCAG |
| | 11 | GGT | | 20 | AGT |
| 37 | E51SaCas9KKH | GTAAGTTCTGTCCAAGCCC | 47 | E51SaCas9KKH | GTTGTGTCACCAGAGTAAC |
| | 11 | GGT | | 21 | AGT |
| 37 | E51SaCas9KKH | GTAAGTTCTGTCCAAGCCC | 48 | E51SaCas9KKH | GAGTAACAGTCTGAGTAGG |
| | 11 | GGT | | 22 | AGC |
| 37 | E51SaCas9KKH | GTAAGTTCTGTCCAAGCCC | 53 | E51SaCas9KKH | TCAACGAGATGATCATCAA |
| | 11 | GGT | | 27 | GCA |
| 37 | E51SaCas9KKH | GTAAGTTCTGTCCAAGCCC | 54 | E51SaCas9KKH | GTGACCTTGAGGATATCAA |
| | 11 | GGT | | 28 | CGA |
| 37 | E51SaCas9KKH | GTAAGTTCTGTCCAAGCCC | 55 | E51SaCas9KKH | TGGGTGACCTTGAGGATAT |
| | 11 | GGT | | 29 | CAA |
| 37 | E51SaCas9KKH | GTAAGTTCTGTCCAAGCCC | 56 | E51SaCas9KKH | GAGGGTGATGGTGGGTGAC |
| | 11 | GGT | | 30 | CTT |
| 37 | E51SaCas9KKH | GTAAGTTCTGTCCAAGCCC | 57 | E51SaCas9KKH | TATAAAATCACAGAGGGTG |
| | 11 | GGT | | 31 | ATG |
| 37 | E51SaCas9KKH | GTAAGTTCTGTCCAAGCCC | 58 | E51SaCas9KKH | AAGTTATAAAATCACAGAG |
| | 11 | GGT | | 32 | GGT |
| 37 | E51SaCas9KKH | GTAAGTTCTGTCCAAGCCC | 59 | E51SaCas9KKH | ATCAAGTTATAAAATCACA |
| | 11 | GGT | | 33 | GAG |
| 37 | E51SaCas9KKH | GTAAGTTCTGTCCAAGCCC | 60 | E51SaCas9KKH | TTGATCAAGTTATAAAATC |
| | 11 | GGT | | 34 | ACA |
| 37 | E51SaCas9KKH | GTAAGTTCTGTCCAAGCCC | 61 | E51SaCas9KKH | CTTTCTCTGCTTGATCAAG |
| | 11 | GGT | | 35 | TTA |
| 37 | E51SaCas9KKH | GTAAGTTCTGTCCAAGCCC | 62 | E51SaCas9KKH | CCGACTGGCTTTCTCTGCT |
| | 11 | GGT | | 36 | TGA |
| 37 | E51SaCas9KKH | GTAAGTTCTGTCCAAGCCC | 63 | E51SaCas9KKH | ACTTACCGACTGGCTTTCT |
| | 11 | GGT | | 37 | CTG |
| 37 | E51SaCas9KKH | GTAAGTTCTGTCCAAGCCC | 64 | E51SaCas9KKH | GATGTTGGAGGTACCTGCT |
| | 11 | GGT | | 38 | CTG |
| 37 | E51SaCas9KKH | GTAAGTTCTGTCCAAGCCC | 65 | E51SaCas9KKH | AAATGCCATCTTCCTTGAT |
| | 11 | GGT | | 39 | GTT |
| 37 | E51SaCas9KKH | GTAAGTTCTGTCCAAGCCC | 66 | E51SaCas9KKH | CCAAACTAGAAATGCCATC |
| | 11 | GGT | | 40 | TTC |
| 37 | E51SaCas9KKH | GTAAGTTCTGTCCAAGCCC | 67 | E51SaCas9KKH | AGGAAACTGCCATCTCCAA |
| | 11 | GGT | | 41 | ACT |
| 37 | E51SaCas9KKH | GTAAGTTCTGTCCAAGCCC | 68 | E51SaCas9KKH | CTGTTACTCTGGTGACACA |
| | 11 | GGT | | 42 | ACC |
| 37 | E51SaCas9KKH | GTAAGTTCTGTCCAAGCCC | 69 | E51SaCas9KKH | TAGCTCCTACTCAGACTGT |
| | 11 | GGT | | 43 | TAC |
| 38 | E51SaCas9KKH | AGCCCGGTTGAAATCTGCC | 39 | E51SaCas9KKH | AGCAGGTACCTCCAACATC |
| | 12 | AGA | | 13 | AAG |
| 38 | E51SaCas9KKH | AGCCCGGTTGAAATCTGCC | 40 | E51SaCas9KKH | CAACATCAAGGAAGATGGC |
| | 12 | AGA | | 14 | ATT |
| 38 | E51SaCas9KKH | AGCCCGGTTGAAATCTGCC | 41 | E51SaCas9KKH | AGGAAGATGGCATTTCTAG |
| | 12 | AGA | | 15 | TTT |
| 38 | E51SaCas9KKH | AGCCCGGTTGAAATCTGCC | 42 | E51SaCas9KKH | ATGGCATTTCTAGTTTGGA |
| | 12 | AGA | | 16 | GAT |
| 38 | E51SaCas9KKH | AGCCCGGTTGAAATCTGCC | 43 | E51SaCas9KKH | CTAGTTTGGAGATGGCAGT |
| | 12 | AGA | | 17 | TTC |
| 38 | E51SaCas9KKH | AGCCCGGTTGAAATCTGCC | 44 | E51SaCas9KKH | GATGGCAGTTTCCTTAGTA |
| | 12 | AGA | | 18 | ACC |
| 38 | E51SaCas9KKH | AGCCCGGTTGAAATCTGCC | 45 | E51SaCas9KKH | TAGTAACCACAGGTTGTGT |
| | 12 | AGA | | 19 | CAC |
| 38 | E51SaCas9KKH | AGCCCGGTTGAAATCTGCC | 46 | E51SaCas9KKH | CCACAGGTTGTGTCACCAG |
| | 12 | AGA | | 20 | AGT |
| 38 | E51SaCas9KKH | AGCCCGGTTGAAATCTGCC | 47 | E51SaCas9KKH | GTTGTGTCACCAGAGTAAC |
| | 12 | AGA | | 21 | AGT |
| 38 | E51SaCas9KKH | AGCCCGGTTGAAATCTGCC | 48 | E51SaCas9KKH | GAGTAACAGTCTGAGTAGG |
| | 12 | AGA | | 22 | AGC |
| 38 | E51SaCas9KKH | AGCCCGGTTGAAATCTGCC | 53 | E51SaCas9KKH | TCAACGAGATGATCATCAA |
| | 12 | AGA | | 27 | GCA |
| 38 | E51SaCas9KKH | AGCCCGGTTGAAATCTGCC | 54 | E51SaCas9KKH | GTGACCTTGAGGATATCAA |
| | 12 | AGA | | 28 | CGA |
| 38 | E51SaCas9KKH | AGCCCGGTTGAAATCTGCC | 55 | E51SaCas9KKH | TGGGTGACCTTGAGGATAT |
| | 12 | AGA | | 29 | CAA |
| 38 | E51SaCas9KKH | AGCCCGGTTGAAATCTGCC | 56 | E51SaCas9KKH | GAGGGTGATGGTGGGTGAC |
| | 12 | AGA | | 30 | CTT |
| 38 | E51SaCas9KKH | AGCCCGGTTGAAATCTGCC | 57 | E51SaCas9KKH | TATAAAATCACAGAGGGTG |
| | 12 | AGA | | 31 | ATG |
| 38 | E51SaCas9KKH | AGCCCGGTTGAAATCTGCC | 58 | E51SaCas9KKH | AAGTTATAAAATCACAGAG |
| | 12 | AGA | | 32 | GGT |
| 38 | E51SaCas9KKH | AGCCCGGTTGAAATCTGCC | 59 | E51SaCas9KKH | ATCAAGTTATAAAATCACA |
| | 12 | AGA | | 33 | GAG |
| 38 | E51SaCas9KKH | AGCCCGGTTGAAATCTGCC | 60 | E51SaCas9KKH | TTGATCAAGTTATAAAATC |
| | 12 | AGA | | 34 | ACA |
| 38 | E51SaCas9KKH | AGCCCGGTTGAAATCTGCC | 61 | E51SaCas9KKH | CTTTCTCTGCTTGATCAAG |
| | 12 | AGA | | 35 | TTA |
| 38 | E51SaCas9KKH | AGCCCGGTTGAAATCTGCC | 62 | E51SaCas9KKH | CCGACTGGCTTTCTCTGCT |
| | 12 | AGA | | 36 | TGA |
| 38 | E51SaCas9KKH | AGCCCGGTTGAAATCTGCC | 63 | E51SaCas9KKH | ACTTACCGACTGGCTTTCT |
| | 12 | AGA | | 37 | CTG |
| 38 | E51SaCas9KKH | AGCCCGGTTGAAATCTGCC | 64 | E51SaCas9KKH | GATGTTGGAGGTACCTGCT |
| | 12 | AGA | | 38 | CTG |
| 38 | E51SaCas9KKH | AGCCCGGTTGAAATCTGCC | 65 | E51SaCas9KKH | AAATGCCATCTTCCTTGAT |
| | 12 | AGA | | 39 | GTT |
| 38 | E51SaCas9KKH | AGCCCGGTTGAAATCTGCC | 66 | E51SaCas9KKH | CCAAACTAGAAATGCCATC |
| | 12 | AGA | | 40 | TTC |
| 38 | E51SaCas9KKH | AGCCCGGTTGAAATCTGCC | 67 | E51SaCas9KKH | AGGAAACTGCCATCTCCAA |
| | 12 | AGA | | 41 | ACT |
| 38 | E51SaCas9KKH | AGCCCGGTTGAAATCTGCC | 68 | E51SaCas9KKH | CTGTTACTCTGGTGACACA |
| | 12 | AGA | | 42 | ACC |
| 38 | E51SaCas9KKH | AGCCCGGTTGAAATCTGCC | 69 | E51SaCas9KKH | TAGCTCCTACTCAGACTGT |
| | 12 | AGA | | 43 | TAC |
| 39 | E51SaCas9KKH | AGCAGGTACCTCCAACATC | 40 | E51SaCas9KKH | CAACATCAAGGAAGATGGC |
| | 13 | AAG | | 14 | ATT |
| 39 | E51SaCas9KKH | AGCAGGTACCTCCAACATC | 41 | E51SaCas9KKH | AGGAAGATGGCATTTCTAG |
| | 13 | AAG | | 15 | TTT |
| 39 | E51SaCas9KKH | AGCAGGTACCTCCAACATC | 42 | E51SaCas9KKH | ATGGCATTTCTAGTTTGGA |
| | 13 | AAG | | 16 | GAT |
| 39 | E51SaCas9KKH | AGCAGGTACCTCCAACATC | 43 | E51SaCas9KKH | CTAGTTTGGAGATGGCAGT |
| | 13 | AAG | | 17 | TTC |
| 39 | E51SaCas9KKH | AGCAGGTACCTCCAACATC | 44 | E51SaCas9KKH | GATGGCAGTTTCCTTAGTA |
| | 13 | AAG | | 18 | ACC |
| 39 | E51SaCas9KKH | AGCAGGTACCTCCAACATC | 45 | E51SaCas9KKH | TAGTAACCACAGGTTGTGT |
| | 13 | AAG | | 19 | CAC |
| 39 | E51SaCas9KKH | AGCAGGTACCTCCAACATC | 46 | E51SaCas9KKH | CCACAGGTTGTGTCACCAG |
| | 13 | AAG | | 20 | AGT |
| 39 | E51SaCas9KKH | AGCAGGTACCTCCAACATC | 47 | E51SaCas9KKH | GTTGTGTCACCAGAGTAAC |
| | 13 | AAG | | 21 | AGT |
| 39 | E51SaCas9KKH | AGCAGGTACCTCCAACATC | 48 | E51SaCas9KKH | GAGTAACAGTCTGAGTAGG |
| | 13 | AAG | | 22 | AGC |
| 39 | E51SaCas9KKH | AGCAGGTACCTCCAACATC | 53 | E51SaCas9KKH | TCAACGAGATGATCATCAA |
| | 13 | AAG | | 27 | GCA |
| 39 | E51SaCas9KKH | AGCAGGTACCTCCAACATC | 54 | E51SaCas9KKH | GTGACCTTGAGGATATCAA |
| | 13 | AAG | | 28 | CGA |
| 39 | E51SaCas9KKH | AGCAGGTACCTCCAACATC | 55 | E51SaCas9KKH | TGGGTGACCTTGAGGATAT |
| | 13 | AAG | | 29 | CAA |
| 39 | E51SaCas9KKH | AGCAGGTACCTCCAACATC | 56 | E51SaCas9KKH | GAGGGTGATGGTGGGTGAC |
| | 13 | AAG | | 30 | CTT |
| 39 | E51SaCas9KKH | AGCAGGTACCTCCAACATC | 57 | E51SaCas9KKH | TATAAAATCACAGAGGGTG |
| | 13 | AAG | | 31 | ATG |
| 39 | E51SaCas9KKH | AGCAGGTACCTCCAACATC | 58 | E51SaCas9KKH | AAGTTATAAAATCACAGAG |
| | 13 | AAG | | 32 | GGT |
| 39 | E51SaCas9KKH | AGCAGGTACCTCCAACATC | 59 | E51SaCas9KKH | ATCAAGTTATAAAATCACA |
| | 13 | AAG | | 33 | GAG |
| 39 | E51SaCas9KKH | AGCAGGTACCTCCAACATC | 60 | E51SaCas9KKH | TTGATCAAGTTATAAAATC |
| | 13 | AAG | | 34 | ACA |
| 39 | E51SaCas9KKH | AGCAGGTACCTCCAACATC | 61 | E51SaCas9KKH | CTTTCTCTGCTTGATCAAG |
| | 13 | AAG | | 35 | TTA |
| 39 | E51SaCas9KKH | AGCAGGTACCTCCAACATC | 62 | E51SaCas9KKH | CCGACTGGCTTTCTCTGCT |
| | 13 | AAG | | 36 | TGA |
| 39 | E51SaCas9KKH | AGCAGGTACCTCCAACATC | 63 | E51SaCas9KKH | ACTTACCGACTGGCTTTCT |
| | 13 | AAG | | 37 | CTG |
| 39 | E51SaCas9KKH | AGCAGGTACCTCCAACATC | 64 | E51SaCas9KKH | GATGTTGGAGGTACCTGCT |
| | 13 | AAG | | 38 | CTG |
| 39 | E51SaCas9KKH | AGCAGGTACCTCCAACATC | 65 | E51SaCas9KKH | AAATGCCATCTTCCTTGAT |
| | 13 | AAG | | 39 | GTT |
| 39 | E51SaCas9KKH | AGCAGGTACCTCCAACATC | 66 | E51SaCas9KKH | CCAAACTAGAAATGCCATC |
| | 13 | AAG | | 40 | TTC |
| 39 | E51SaCas9KKH | AGCAGGTACCTCCAACATC | 67 | E51SaCas9KKH | AGGAAACTGCCATCTCCAA |
| | 13 | AAG | | 41 | ACT |
| 39 | E51SaCas9KKH | AGCAGGTACCTCCAACATC | 68 | E51SaCas9KKH | CTGTTACTCTGGTGACACA |
| | 13 | AAG | | 42 | ACC |
| 39 | E51SaCas9KKH | AGCAGGTACCTCCAACATC | 69 | E51SaCas9KKH | TAGCTCCTACTCAGACTGT |
| | 13 | AAG | | 43 | TAC |
| 40 | E51SaCas9KKH | CAACATCAAGGAAGATGGC | 41 | E51SaCas9KKH | AGGAAGATGGCATTTCTAG |
| | 14 | ATT | | 15 | TTT |
| 40 | E51SaCas9KKH | CAACATCAAGGAAGATGGC | 42 | E51SaCas9KKH | ATGGCATTTCTAGTTTGGA |
| | 14 | ATT | | 16 | GAT |
| 40 | E51SaCas9KKH | CAACATCAAGGAAGATGGC | 43 | E51SaCas9KKH | CTAGTTTGGAGATGGCAGT |
| | 14 | ATT | | 17 | TTC |
| 40 | E51SaCas9KKH | CAACATCAAGGAAGATGGC | 44 | E51SaCas9KKH | GATGGCAGTTTCCTTAGTA |
| | 14 | ATT | | 18 | ACC |
| 40 | E51SaCas9KKH | CAACATCAAGGAAGATGGC | 45 | E51SaCas9KKH | TAGTAACCACAGGTTGTGT |
| | 14 | ATT | | 19 | CAC |
| 40 | E51SaCas9KKH | CAACATCAAGGAAGATGGC | 46 | E51SaCas9KKH | CCACAGGTTGTGTCACCAG |
| | 14 | ATT | | 20 | AGT |
| 40 | E51SaCas9KKH | CAACATCAAGGAAGATGGC | 47 | E51SaCas9KKH | GTTGTGTCACCAGAGTAAC |
| | 14 | ATT | | 21 | AGT |
| 40 | E51SaCas9KKH | CAACATCAAGGAAGATGGC | 48 | E51SaCas9KKH | GAGTAACAGTCTGAGTAGG |
| | 14 | ATT | | 22 | AGC |
| 40 | E51SaCas9KKH | CAACATCAAGGAAGATGGC | 53 | E51SaCas9KKH | TCAACGAGATGATCATCAA |
| | 14 | ATT | | 27 | GCA |
| 40 | E51SaCas9KKH | CAACATCAAGGAAGATGGC | 54 | E51SaCas9KKH | GTGACCTTGAGGATATCAA |
| | 14 | ATT | | 28 | CGA |
| 40 | E51SaCas9KKH | CAACATCAAGGAAGATGGC | 55 | E51SaCas9KKH | TGGGTGACCTTGAGGATAT |
| | 14 | ATT | | 29 | CAA |
| 40 | E51SaCas9KKH | CAACATCAAGGAAGATGGC | 56 | E51SaCas9KKH | GAGGGTGATGGTGGGTGAC |
| | 14 | ATT | | 30 | CTT |
| 40 | E51SaCas9KKH | CAACATCAAGGAAGATGGC | 57 | E51SaCas9KKH | TATAAAATCACAGAGGGTG |
| | 14 | ATT | | 31 | ATG |
| 40 | E51SaCas9KKH | CAACATCAAGGAAGATGGC | 58 | E51SaCas9KKH | AAGTTATAAAATCACAGAG |
| | 14 | ATT | | 32 | GGT |
| 40 | E51SaCas9KKH | CAACATCAAGGAAGATGGC | 59 | E51SaCas9KKH | ATCAAGTTATAAAATCACA |
| | 14 | ATT | | 33 | GAG |
| 40 | E51SaCas9KKH | CAACATCAAGGAAGATGGC | 60 | E51SaCas9KKH | TTGATCAAGTTATAAAATC |
| | 14 | ATT | | 34 | ACA |
| 40 | E51SaCas9KKH | CAACATCAAGGAAGATGGC | 61 | E51SaCas9KKH | CTTTCTCTGCTTGATCAAG |
| | 14 | ATT | | 35 | TTA |
| 40 | E51SaCas9KKH | CAACATCAAGGAAGATGGC | 62 | E51SaCas9KKH | CCGACTGGCTTTCTCTGCT |
| | 14 | ATT | | 36 | TGA |
| 40 | E51SaCas9KKH | CAACATCAAGGAAGATGGC | 63 | E51SaCas9KKH | ACTTACCGACTGGCTTTCT |
| | 14 | ATT | | 37 | CTG |
| 40 | E51SaCas9KKH | CAACATCAAGGAAGATGGC | 64 | E51SaCas9KKH | GATGTTGGAGGTACCTGCT |
| | 14 | ATT | | 38 | CTG |
| 40 | E51SaCas9KKH | CAACATCAAGGAAGATGGC | 65 | E51SaCas9KKH | AAATGCCATCTTCCTTGAT |
| | 14 | ATT | | 39 | GTT |
| 40 | E51SaCas9KKH | CAACATCAAGGAAGATGGC | 66 | E51SaCas9KKH | CCAAACTAGAAATGCCATC |
| | 14 | ATT | | 40 | TTC |
| 40 | E51SaCas9KKH | CAACATCAAGGAAGATGGC | 67 | E51SaCas9KKH | AGGAAACTGCCATCTCCAA |
| | 14 | ATT | | 41 | ACT |
| 40 | E51SaCas9KKH | CAACATCAAGGAAGATGGC | 68 | E51SaCas9KKH | CTGTTACTCTGGTGACACA |
| | 14 | ATT | | 42 | ACC |
| 40 | E51SaCas9KKH | CAACATCAAGGAAGATGGC | 69 | E51SaCas9KKH | TAGCTCCTACTCAGACTGT |
| | 14 | ATT | | 43 | TAC |
| 41 | E51SaCas9KKH | AGGAAGATGGCATTTCTAG | 42 | E51SaCas9KKH | ATGGCATTTCTAGTTTGGA |
| | 15 | TTT | | 16 | GAT |
| 41 | E51SaCas9KKH | AGGAAGATGGCATTTCTAG | 43 | E51SaCas9KKH | CTAGTTTGGAGATGGCAGT |
| | 15 | TTT | | 17 | TTC |
| 41 | E51SaCas9KKH | AGGAAGATGGCATTTCTAG | 44 | E51SaCas9KKH | GATGGCAGTTTCCTTAGTA |
| | 15 | TTT | | 18 | ACC |
| 41 | E51SaCas9KKH | AGGAAGATGGCATTTCTAG | 45 | E51SaCas9KKH | TAGTAACCACAGGTTGTGT |
| | 15 | TTT | | 19 | CAC |
| 41 | E51SaCas9KKH | AGGAAGATGGCATTTCTAG | 46 | E51SaCas9KKH | CCACAGGTTGTGTCACCAG |
| | 15 | TTT | | 20 | AGT |
| 41 | E51SaCas9KKH | AGGAAGATGGCATTTCTAG | 47 | E51SaCas9KKH | GTTGTGTCACCAGAGTAAC |
| | 15 | TTT | | 21 | AGT |
| 41 | E51SaCas9KKH | AGGAAGATGGCATTTCTAG | 48 | E51SaCas9KKH | GAGTAACAGTCTGAGTAGG |
| | 15 | TTT | | 22 | AGC |
| 41 | E51SaCas9KKH | AGGAAGATGGCATTTCTAG | 53 | E51SaCas9KKH | TCAACGAGATGATCATCAA |
| | 15 | TTT | | 27 | GCA |
| 41 | E51SaCas9KKH | AGGAAGATGGCATTTCTAG | 54 | E51SaCas9KKH | GTGACCTTGAGGATATCAA |
| | 15 | TTT | | 28 | CGA |
| 41 | E51SaCas9KKH | AGGAAGATGGCATTTCTAG | 55 | E51SaCas9KKH | TGGGTGACCTTGAGGATAT |
| | 15 | TTT | | 29 | CAA |
| 41 | E51SaCas9KKH | AGGAAGATGGCATTTCTAG | 56 | E51SaCas9KKH | GAGGGTGATGGTGGGTGAC |
| | 15 | TTT | | 30 | CTT |
| 41 | E51SaCas9KKH | AGGAAGATGGCATTTCTAG | 57 | E51SaCas9KKH | TATAAAATCACAGAGGGTG |
| | 15 | TTT | | 31 | ATG |
| 41 | E51SaCas9KKH | AGGAAGATGGCATTTCTAG | 58 | E51SaCas9KKH | AAGTTATAAAATCACAGAG |
| | 15 | TTT | | 32 | GGT |
| 41 | E51SaCas9KKH | AGGAAGATGGCATTTCTAG | 59 | E51SaCas9KKH | ATCAAGTTATAAAATCACA |
| | 15 | TTT | | 33 | GAG |
| 41 | E51SaCas9KKH | AGGAAGATGGCATTTCTAG | 60 | E51SaCas9KKH | TTGATCAAGTTATAAAATC |
| | 15 | TTT | | 34 | ACA |
| 41 | E51SaCas9KKH | AGGAAGATGGCATTTCTAG | 61 | E51SaCas9KKH | CTTTCTCTGCTTGATCAAG |
| | 15 | TTT | | 35 | TTA |
| 41 | E51SaCas9KKH | AGGAAGATGGCATTTCTAG | 62 | E51SaCas9KKH | CCGACTGGCTTTCTCTGCT |
| | 15 | TTT | | 36 | TGA |
| 41 | E51SaCas9KKH | AGGAAGATGGCATTTCTAG | 63 | E51SaCas9KKH | ACTTACCGACTGGCTTTCT |
| | 15 | TTT | | 37 | CTG |
| 41 | E51SaCas9KKH | AGGAAGATGGCATTTCTAG | 64 | E51SaCas9KKH | GATGTTGGAGGTACCTGCT |
| | 15 | TTT | | 38 | CTG |
| 41 | E51SaCas9KKH | AGGAAGATGGCATTTCTAG | 65 | E51SaCas9KKH | AAATGCCATCTTCCTTGAT |
| | 15 | TTT | | 39 | GTT |
| 41 | E51SaCas9KKH | AGGAAGATGGCATTTCTAG | 66 | E51SaCas9KKH | CCAAACTAGAAATGCCATC |
| | 15 | TTT | | 40 | TTC |
| 41 | E51SaCas9KKH | AGGAAGATGGCATTTCTAG | 67 | E51SaCas9KKH | AGGAAACTGCCATCTCCAA |
| | 15 | TTT | | 41 | ACT |
| 41 | E51SaCas9KKH | AGGAAGATGGCATTTCTAG | 68 | E51SaCas9KKH | CTGTTACTCTGGTGACACA |
| | 15 | TTT | | 42 | ACC |
| 41 | E51SaCas9KKH | AGGAAGATGGCATTTCTAG | 69 | E51SaCas9KKH | TAGCTCCTACTCAGACTGT |
| | 15 | TTT | | 43 | TAC |
| 42 | E51SaCas9KKH | ATGGCATTTCTAGTTTGGA | 43 | E51SaCas9KKH | CTAGTTTGGAGATGGCAGT |
| | 16 | GAT | | 17 | TTC |
| 42 | E51SaCas9KKH | ATGGCATTTCTAGTTTGGA | 44 | E51SaCas9KKH | GATGGCAGTTTCCTTAGTA |
| | 16 | GAT | | 18 | ACC |
| 42 | E51SaCas9KKH | ATGGCATTTCTAGTTTGGA | 45 | E51SaCas9KKH | TAGTAACCACAGGTTGTGT |
| | 16 | GAT | | 19 | CAC |
| 42 | E51SaCas9KKH | ATGGCATTTCTAGTTTGGA | 46 | E51SaCas9KKH | CCACAGGTTGTGTCACCAG |
| | 16 | GAT | | 20 | AGT |
| 42 | E51SaCas9KKH | ATGGCATTTCTAGTTTGGA | 47 | E51SaCas9KKH | GTTGTGTCACCAGAGTAAC |
| | 16 | GAT | | 21 | AGT |
| 42 | E51SaCas9KKH | ATGGCATTTCTAGTTTGGA | 48 | E51SaCas9KKH | GAGTAACAGTCTGAGTAGG |
| | 16 | GAT | | 22 | AGC |
| 42 | E51SaCas9KKH | ATGGCATTTCTAGTTTGGA | 53 | E51SaCas9KKH | TCAACGAGATGATCATCAA |
| | 16 | GAT | | 27 | GCA |
| 42 | E51SaCas9KKH | ATGGCATTTCTAGTTTGGA | 54 | E51SaCas9KKH | GTGACCTTGAGGATATCAA |
| | 16 | GAT | | 28 | CGA |
| 42 | E51SaCas9KKH | ATGGCATTTCTAGTTTGGA | 55 | E51SaCas9KKH | TGGGTGACCTTGAGGATAT |
| | 16 | GAT | | 29 | CAA |
| 42 | E51SaCas9KKH | ATGGCATTTCTAGTTTGGA | 56 | E51SaCas9KKH | GAGGGTGATGGTGGGTGAC |
| | 16 | GAT | | 30 | CTT |
| 42 | E51SaCas9KKH | ATGGCATTTCTAGTTTGGA | 57 | E51SaCas9KKH | TATAAAATCACAGAGGGTG |
| | 16 | GAT | | 31 | ATG |
| 42 | E51SaCas9KKH | ATGGCATTTCTAGTTTGGA | 58 | E51SaCas9KKH | AAGTTATAAAATCACAGAG |
| | 16 | GAT | | 32 | GGT |
| 42 | E51SaCas9KKH | ATGGCATTTCTAGTTTGGA | 59 | E51SaCas9KKH | ATCAAGTTATAAAATCACA |
| | 16 | GAT | | 33 | GAG |
| 42 | E51SaCas9KKH | ATGGCATTTCTAGTTTGGA | 60 | E51SaCas9KKH | TTGATCAAGTTATAAAATC |
| | 16 | GAT | | 34 | ACA |
| 42 | E51SaCas9KKH | ATGGCATTTCTAGTTTGGA | 61 | E51SaCas9KKH | CTTTCTCTGCTTGATCAAG |
| | 16 | GAT | | 35 | TTA |
| 42 | E51SaCas9KKH | ATGGCATTTCTAGTTTGGA | 62 | E51SaCas9KKH | CCGACTGGCTTTCTCTGCT |
| | 16 | GAT | | 36 | TGA |
| 42 | E51SaCas9KKH | ATGGCATTTCTAGTTTGGA | 63 | E51SaCas9KKH | ACTTACCGACTGGCTTTCT |
| | 16 | GAT | | 37 | CTG |
| 42 | E51SaCas9KKH | ATGGCATTTCTAGTTTGGA | 64 | E51SaCas9KKH | GATGTTGGAGGTACCTGCT |
| | 16 | GAT | | 38 | CTG |
| 42 | E51SaCas9KKH | ATGGCATTTCTAGTTTGGA | 65 | E51SaCas9KKH | AAATGCCATCTTCCTTGAT |
| | 16 | GAT | | 39 | GTT |
| 42 | E51SaCas9KKH | ATGGCATTTCTAGTTTGGA | 66 | E51SaCas9KKH | CCAAACTAGAAATGCCATC |
| | 16 | GAT | | 40 | TTC |
| 42 | E51SaCas9KKH | ATGGCATTTCTAGTTTGGA | 67 | E51SaCas9KKH | AGGAAACTGCCATCTCCAA |
| | 16 | GAT | | 41 | ACT |
| 42 | E51SaCas9KKH | ATGGCATTTCTAGTTTGGA | 68 | E51SaCas9KKH | CTGTTACTCTGGTGACACA |
| | 16 | GAT | | 42 | ACC |
| 42 | E51SaCas9KKH | ATGGCATTTCTAGTTTGGA | 69 | E51SaCas9KKH | TAGCTCCTACTCAGACTGT |
| | 16 | GAT | | 43 | TAC |
| 43 | E51SaCas9KKH | CTAGTTTGGAGATGGCAGT | 44 | E51SaCas9KKH | GATGGCAGTTTCCTTAGTA |
| | 17 | TTC | | 18 | ACC |
| 43 | E51SaCas9KKH | CTAGTTTGGAGATGGCAGT | 45 | E51SaCas9KKH | TAGTAACCACAGGTTGTGT |
| | 17 | TTC | | 19 | CAC |
| 43 | E51SaCas9KKH | CTAGTTTGGAGATGGCAGT | 46 | E51SaCas9KKH | CCACAGGTTGTGTCACCAG |
| | 17 | TTC | | 20 | AGT |
| 43 | E51SaCas9KKH | CTAGTTTGGAGATGGCAGT | 47 | E51SaCas9KKH | GTTGTGTCACCAGAGTAAC |
| | 17 | TTC | | 21 | AGT |
| 43 | E51SaCas9KKH | CTAGTTTGGAGATGGCAGT | 48 | E51SaCas9KKH | GAGTAACAGTCTGAGTAGG |
| | 17 | TTC | | 22 | AGC |
| 43 | E51SaCas9KKH | CTAGTTTGGAGATGGCAGT | 53 | E51SaCas9KKH | TCAACGAGATGATCATCAA |
| | 17 | TTC | | 27 | GCA |
| 43 | E51SaCas9KKH | CTAGTTTGGAGATGGCAGT | 54 | E51SaCas9KKH | GTGACCTTGAGGATATCAA |
| | 17 | TTC | | 28 | CGA |
| 43 | E51SaCas9KKH | CTAGTTTGGAGATGGCAGT | 55 | E51SaCas9KKH | TGGGTGACCTTGAGGATAT |
| | 17 | TTC | | 29 | CAA |
| 43 | E51SaCas9KKH | CTAGTTTGGAGATGGCAGT | 56 | E51SaCas9KKH | GAGGGTGATGGTGGGTGAC |
| | 17 | TTC | | 30 | CTT |
| 43 | E51SaCas9KKH | CTAGTTTGGAGATGGCAGT | 57 | E51SaCas9KKH | TATAAAATCACAGAGGGTG |
| | 17 | TTC | | 31 | ATG |
| 43 | E51SaCas9KKH | CTAGTTTGGAGATGGCAGT | 58 | E51SaCas9KKH | AAGTTATAAAATCACAGAG |
| | 17 | TTC | | 32 | GGT |
| 43 | E51SaCas9KKH | CTAGTTTGGAGATGGCAGT | 59 | E51SaCas9KKH | ATCAAGTTATAAAATCACA |
| | 17 | TTC | | 33 | GAG |
| 43 | E51SaCas9KKH | CTAGTTTGGAGATGGCAGT | 60 | E51SaCas9KKH | TTGATCAAGTTATAAAATC |
| | 17 | TTC | | 34 | ACA |
| 43 | E51SaCas9KKH | CTAGTTTGGAGATGGCAGT | 61 | E51SaCas9KKH | CTTTCTCTGCTTGATCAAG |
| | 17 | TTC | | 35 | TTA |
| 43 | E51SaCas9KKH | CTAGTTTGGAGATGGCAGT | 62 | E51SaCas9KKH | CCGACTGGCTTTCTCTGCT |
| | 17 | TTC | | 36 | TGA |
| 43 | E51SaCas9KKH | CTAGTTTGGAGATGGCAGT | 63 | E51SaCas9KKH | ACTTACCGACTGGCTTTCT |
| | 17 | TTC | | 37 | CTG |
| 43 | E51SaCas9KKH | CTAGTTTGGAGATGGCAGT | 64 | E51SaCas9KKH | GATGTTGGAGGTACCTGCT |
| | 17 | TTC | | 38 | CTG |
| 43 | E51SaCas9KKH | CTAGTTTGGAGATGGCAGT | 65 | E51SaCas9KKH | AAATGCCATCTTCCTTGAT |
| | 17 | TTC | | 39 | GTT |
| 43 | E51SaCas9KKH | CTAGTTTGGAGATGGCAGT | 66 | E51SaCas9KKH | CCAAACTAGAAATGCCATC |
| | 17 | TTC | | 40 | TTC |
| 43 | E51SaCas9KKH | CTAGTTTGGAGATGGCAGT | 67 | E51SaCas9KKH | AGGAAACTGCCATCTCCAA |
| | 17 | TTC | | 41 | ACT |
| 43 | E51SaCas9KKH | CTAGTTTGGAGATGGCAGT | 68 | E51SaCas9KKH | CTGTTACTCTGGTGACACA |
| | 17 | TTC | | 42 | ACC |
| 43 | E51SaCas9KKH | CTAGTTTGGAGATGGCAGT | 69 | E51SaCas9KKH | TAGCTCCTACTCAGACTGT |
| | 17 | TTC | | 43 | TAC |
| 44 | E51SaCas9KKH | GATGGCAGTTTCCTTAGTA | 45 | E51SaCas9KKH | TAGTAACCACAGGTTGTGT |
| | 18 | ACC | | 19 | CAC |
| 44 | E51SaCas9KKH | GATGGCAGTTTCCTTAGTA | 46 | E51SaCas9KKH | CCACAGGTTGTGTCACCAG |
| | 18 | ACC | | 20 | AGT |
| 44 | E51SaCas9KKH | GATGGCAGTTTCCTTAGTA | 47 | E51SaCas9KKH | GTTGTGTCACCAGAGTAAC |
| | 18 | ACC | | 21 | AGT |
| 44 | E51SaCas9KKH | GATGGCAGTTTCCTTAGTA | 48 | E51SaCas9KKH | GAGTAACAGTCTGAGTAGG |
| | 18 | ACC | | 22 | AGC |
| 44 | E51SaCas9KKH | GATGGCAGTTTCCTTAGTA | 53 | E51SaCas9KKH | TCAACGAGATGATCATCAA |
| | 18 | ACC | | 27 | GCA |
| 44 | E51SaCas9KKH | GATGGCAGTTTCCTTAGTA | 54 | E51SaCas9KKH | GTGACCTTGAGGATATCAA |
| | 18 | ACC | | 28 | CGA |
| 44 | E51SaCas9KKH | GATGGCAGTTTCCTTAGTA | 55 | E51SaCas9KKH | TGGGTGACCTTGAGGATAT |
| | 18 | ACC | | 29 | CAA |
| 44 | E51SaCas9KKH | GATGGCAGTTTCCTTAGTA | 56 | E51SaCas9KKH | GAGGGTGATGGTGGGTGAC |
| | 18 | ACC | | 30 | CTT |
| 44 | E51SaCas9KKH | GATGGCAGTTTCCTTAGTA | 57 | E51SaCas9KKH | TATAAAATCACAGAGGGTG |
| | 18 | ACC | | 31 | ATG |
| 44 | E51SaCas9KKH | GATGGCAGTTTCCTTAGTA | 58 | E51SaCas9KKH | AAGTTATAAAATCACAGAG |
| | 18 | ACC | | 32 | GGT |
| 44 | E51SaCas9KKH | GATGGCAGTTTCCTTAGTA | 59 | E51SaCas9KKH | ATCAAGTTATAAAATCACA |
| | 18 | ACC | | 33 | GAG |
| 44 | E51SaCas9KKH | GATGGCAGTTTCCTTAGTA | 60 | E51SaCas9KKH | TTGATCAAGTTATAAAATC |
| | 18 | ACC | | 34 | ACA |
| 44 | E51SaCas9KKH | GATGGCAGTTTCCTTAGTA | 61 | E51SaCas9KKH | CTTTCTCTGCTTGATCAAG |
| | 18 | ACC | | 35 | TTA |
| 44 | E51SaCas9KKH | GATGGCAGTTTCCTTAGTA | 62 | E51SaCas9KKH | CCGACTGGCTTTCTCTGCT |
| | 18 | ACC | | 36 | TGA |
| 44 | E51SaCas9KKH | GATGGCAGTTTCCTTAGTA | 63 | E51SaCas9KKH | ACTTACCGACTGGCTTTCT |
| | 18 | ACC | | 37 | CTG |
| 44 | E51SaCas9KKH | GATGGCAGTTTCCTTAGTA | 64 | E51SaCas9KKH | GATGTTGGAGGTACCTGCT |
| | 18 | ACC | | 38 | CTG |
| 44 | E51SaCas9KKH | GATGGCAGTTTCCTTAGTA | 65 | E51SaCas9KKH | AAATGCCATCTTCCTTGAT |
| | 18 | ACC | | 39 | GTT |
| 44 | E51SaCas9KKH | GATGGCAGTTTCCTTAGTA | 66 | E51SaCas9KKH | CCAAACTAGAAATGCCATC |
| | 18 | ACC | | 40 | TTC |
| 44 | E51SaCas9KKH | GATGGCAGTTTCCTTAGTA | 67 | E51SaCas9KKH | AGGAAACTGCCATCTCCAA |
| | 18 | ACC | | 41 | ACT |
| 44 | E51SaCas9KKH | GATGGCAGTTTCCTTAGTA | 68 | E51SaCas9KKH | CTGTTACTCTGGTGACACA |
| | 18 | ACC | | 42 | ACC |
| 44 | E51SaCas9KKH | GATGGCAGTTTCCTTAGTA | 69 | E51SaCas9KKH | TAGCTCCTACTCAGACTGT |
| | 18 | ACC | | 43 | TAC |
| 45 | E51SaCas9KKH | TAGTAACCACAGGTTGTGT | 46 | E51SaCas9KKH | CCACAGGTTGTGTCACCAG |
| | 19 | CAC | | 20 | AGT |
| 45 | E51SaCas9KKH | TAGTAACCACAGGTTGTGT | 47 | E51SaCas9KKH | GTTGTGTCACCAGAGTAAC |
| | 19 | CAC | | 21 | AGT |
| 45 | E51SaCas9KKH | TAGTAACCACAGGTTGTGT | 48 | E51SaCas9KKH | GAGTAACAGTCTGAGTAGG |
| | 19 | CAC | | 22 | AGC |
| 45 | E51SaCas9KKH | TAGTAACCACAGGTTGTGT | 53 | E51SaCas9KKH | TCAACGAGATGATCATCAA |
| | 19 | CAC | | 27 | GCA |
| 45 | E51SaCas9KKH | TAGTAACCACAGGTTGTGT | 54 | E51SaCas9KKH | GTGACCTTGAGGATATCAA |
| | 19 | CAC | | 28 | CGA |
| 45 | E51SaCas9KKH | TAGTAACCACAGGTTGTGT | 55 | E51SaCas9KKH | TGGGTGACCTTGAGGATAT |
| | 19 | CAC | | 29 | CAA |
| 45 | E51SaCas9KKH | TAGTAACCACAGGTTGTGT | 56 | E51SaCas9KKH | GAGGGTGATGGTGGGTGAC |
| | 19 | CAC | | 30 | CTT |
| 45 | E51SaCas9KKH | TAGTAACCACAGGTTGTGT | 57 | E51SaCas9KKH | TATAAAATCACAGAGGGTG |
| | 19 | CAC | | 31 | ATG |
| 45 | E51SaCas9KKH | TAGTAACCACAGGTTGTGT | 58 | E51SaCas9KKH | AAGTTATAAAATCACAGAG |
| | 19 | CAC | | 32 | GGT |
| 45 | E51SaCas9KKH | TAGTAACCACAGGTTGTGT | 59 | E51SaCas9KKH | ATCAAGTTATAAAATCACA |
| | 19 | CAC | | 33 | GAG |
| 45 | E51SaCas9KKH | TAGTAACCACAGGTTGTGT | 60 | E51SaCas9KKH | TTGATCAAGTTATAAAATC |
| | 19 | CAC | | 34 | ACA |
| 45 | E51SaCas9KKH | TAGTAACCACAGGTTGTGT | 61 | E51SaCas9KKH | CTTTCTCTGCTTGATCAAG |
| | 19 | CAC | | 35 | TTA |
| 45 | E51SaCas9KKH | TAGTAACCACAGGTTGTGT | 62 | E51SaCas9KKH | CCGACTGGCTTTCTCTGCT |
| | 19 | CAC | | 36 | TGA |
| 45 | E51SaCas9KKH | TAGTAACCACAGGTTGTGT | 63 | E51SaCas9KKH | ACTTACCGACTGGCTTTCT |
| | 19 | CAC | | 37 | CTG |
| 45 | E51SaCas9KKH | TAGTAACCACAGGTTGTGT | 64 | E51SaCas9KKH | GATGTTGGAGGTACCTGCT |
| | 19 | CAC | | 38 | CTG |
| 45 | E51SaCas9KKH | TAGTAACCACAGGTTGTGT | 65 | E51SaCas9KKH | AAATGCCATCTTCCTTGAT |
| | 19 | CAC | | 39 | GTT |
| 45 | E51SaCas9KKH | TAGTAACCACAGGTTGTGT | 66 | E51SaCas9KKH | CCAAACTAGAAATGCCATC |
| | 19 | CAC | | 40 | TTC |
| 45 | E51SaCas9KKH | TAGTAACCACAGGTTGTGT | 67 | E51SaCas9KKH | AGGAAACTGCCATCTCCAA |
| | 19 | CAC | | 41 | ACT |
| 45 | E51SaCas9KKH | TAGTAACCACAGGTTGTGT | 68 | E51SaCas9KKH | CTGTTACTCTGGTGACACA |
| | 19 | CAC | | 42 | ACC |
| 45 | E51SaCas9KKH | TAGTAACCACAGGTTGTGT | 69 | E51SaCas9KKH | TAGCTCCTACTCAGACTGT |
| | 19 | CAC | | 43 | TAC |
| 46 | E51SaCas9KKH | CCACAGGTTGTGTCACCAG | 47 | E51SaCas9KKH | GTTGTGTCACCAGAGTAAC |
| | 20 | AGT | | 21 | AGT |
| 46 | E51SaCas9KKH | CCACAGGTTGTGTCACCAG | 48 | E51SaCas9KKH | GAGTAACAGTCTGAGTAGG |
| | 20 | AGT | | 22 | AGC |
| 46 | E51SaCas9KKH | CCACAGGTTGTGTCACCAG | 53 | E51SaCas9KKH | TCAACGAGATGATCATCAA |
| | 20 | AGT | | 27 | GCA |
| 46 | E51SaCas9KKH | CCACAGGTTGTGTCACCAG | 54 | E51SaCas9KKH | GTGACCTTGAGGATATCAA |
| | 20 | AGT | | 28 | CGA |
| 46 | E51SaCas9KKH | CCACAGGTTGTGTCACCAG | 55 | E51SaCas9KKH | TGGGTGACCTTGAGGATAT |
| | 20 | AGT | | 29 | CAA |
| 46 | E51SaCas9KKH | CCACAGGTTGTGTCACCAG | 56 | E51SaCas9KKH | GAGGGTGATGGTGGGTGAC |
| | 20 | AGT | | 30 | CTT |
| 46 | E51SaCas9KKH | CCACAGGTTGTGTCACCAG | 57 | E51SaCas9KKH | TATAAAATCACAGAGGGTG |
| | 20 | AGT | | 31 | ATG |
| 46 | E51SaCas9KKH | CCACAGGTTGTGTCACCAG | 58 | E51SaCas9KKH | AAGTTATAAAATCACAGAG |
| | 20 | AGT | | 32 | GGT |
| 46 | E51SaCas9KKH | CCACAGGTTGTGTCACCAG | 59 | E51SaCas9KKH | ATCAAGTTATAAAATCACA |
| | 20 | AGT | | 33 | GAG |
| 46 | E51SaCas9KKH | CCACAGGTTGTGTCACCAG | 60 | E51SaCas9KKH | TTGATCAAGTTATAAAATC |
| | 20 | AGT | | 34 | ACA |
| 46 | E51SaCas9KKH | CCACAGGTTGTGTCACCAG | 61 | E51SaCas9KKH | CTTTCTCTGCTTGATCAAG |
| | 20 | AGT | | 35 | TTA |
| 46 | E51SaCas9KKH | CCACAGGTTGTGTCACCAG | 62 | E51SaCas9KKH | CCGACTGGCTTTCTCTGCT |
| | 20 | AGT | | 36 | TGA |
| 46 | E51SaCas9KKH | CCACAGGTTGTGTCACCAG | 63 | E51SaCas9KKH | ACTTACCGACTGGCTTTCT |
| | 20 | AGT | | 37 | CTG |
| 46 | E51SaCas9KKH | CCACAGGTTGTGTCACCAG | 64 | E51SaCas9KKH | GATGTTGGAGGTACCTGCT |
| | 20 | AGT | | 38 | CTG |
| 46 | E51SaCas9KKH | CCACAGGTTGTGTCACCAG | 65 | E51SaCas9KKH | AAATGCCATCTTCCTTGAT |
| | 20 | AGT | | 39 | GTT |
| 46 | E51SaCas9KKH | CCACAGGTTGTGTCACCAG | 66 | E51SaCas9KKH | CCAAACTAGAAATGCCATC |
| | 20 | AGT | | 40 | TTC |
| 46 | E51SaCas9KKH | CCACAGGTTGTGTCACCAG | 67 | E51SaCas9KKH | AGGAAACTGCCATCTCCAA |
| | 20 | AGT | | 41 | ACT |
| 46 | E51SaCas9KKH | CCACAGGTTGTGTCACCAG | 68 | E51SaCas9KKH | CTGTTACTCTGGTGACACA |
| | 20 | AGT | | 42 | ACC |
| 46 | E51SaCas9KKH | CCACAGGTTGTGTCACCAG | 69 | E51SaCas9KKH | TAGCTCCTACTCAGACTGT |
| | 20 | AGT | | 43 | TAC |
| 47 | E51SaCas9KKH | GTTGTGTCACCAGAGTAAC | 48 | E51SaCas9KKH | GAGTAACAGTCTGAGTAGG |
| | 21 | AGT | | 22 | AGC |
| 47 | E51SaCas9KKH | GTTGTGTCACCAGAGTAAC | 53 | E51SaCas9KKH | TCAACGAGATGATCATCAA |
| | 21 | AGT | | 27 | GCA |
| 47 | E51SaCas9KKH | GTTGTGTCACCAGAGTAAC | 54 | E51SaCas9KKH | GTGACCTTGAGGATATCAA |
| | 21 | AGT | | 28 | CGA |
| 47 | E51SaCas9KKH | GTTGTGTCACCAGAGTAAC | 55 | E51SaCas9KKH | TGGGTGACCTTGAGGATAT |
| | 21 | AGT | | 29 | CAA |
| 47 | E51SaCas9KKH | GTTGTGTCACCAGAGTAAC | 56 | E51SaCas9KKH | GAGGGTGATGGTGGGTGAC |
| | 21 | AGT | | 30 | CTT |
| 47 | E51SaCas9KKH | GTTGTGTCACCAGAGTAAC | 57 | E51SaCas9KKH | TATAAAATCACAGAGGGTG |
| | 21 | AGT | | 31 | ATG |
| 47 | E51SaCas9KKH | GTTGTGTCACCAGAGTAAC | 58 | E51SaCas9KKH | AAGTTATAAAATCACAGAG |
| | 21 | AGT | | 32 | GGT |
| 47 | E51SaCas9KKH | GTTGTGTCACCAGAGTAAC | 59 | E51SaCas9KKH | ATCAAGTTATAAAATCACA |
| | 21 | AGT | | 33 | GAG |
| 47 | E51SaCas9KKH | GTTGTGTCACCAGAGTAAC | 60 | E51SaCas9KKH | TTGATCAAGTTATAAAATC |
| | 21 | AGT | | 34 | ACA |
| 47 | E51SaCas9KKH | GTTGTGTCACCAGAGTAAC | 61 | E51SaCas9KKH | CTTTCTCTGCTTGATCAAG |
| | 21 | AGT | | 35 | TTA |
| 47 | E51SaCas9KKH | GTTGTGTCACCAGAGTAAC | 62 | E51SaCas9KKH | CCGACTGGCTTTCTCTGCT |
| | 21 | AGT | | 36 | TGA |
| 47 | E51SaCas9KKH | GTTGTGTCACCAGAGTAAC | 63 | E51SaCas9KKH | ACTTACCGACTGGCTTTCT |
| | 21 | AGT | | 37 | CTG |
| 47 | E51SaCas9KKH | GTTGTGTCACCAGAGTAAC | 64 | E51SaCas9KKH | GATGTTGGAGGTACCTGCT |
| | 21 | AGT | | 38 | CTG |
| 47 | E51SaCas9KKH | GTTGTGTCACCAGAGTAAC | 65 | E51SaCas9KKH | AAATGCCATCTTCCTTGAT |
| | 21 | AGT | | 39 | GTT |
| 47 | E51SaCas9KKH | GTTGTGTCACCAGAGTAAC | 66 | E51SaCas9KKH | CCAAACTAGAAATGCCATC |
| | 21 | AGT | | 40 | TTC |
| 47 | E51SaCas9KKH | GTTGTGTCACCAGAGTAAC | 67 | E51SaCas9KKH | AGGAAACTGCCATCTCCAA |
| | 21 | AGT | | 41 | ACT |
| 47 | E51SaCas9KKH | GTTGTGTCACCAGAGTAAC | 68 | E51SaCas9KKH | CTGTTACTCTGGTGACACA |
| | 21 | AGT | | 42 | ACC |
| 47 | E51SaCas9KKH | GTTGTGTCACCAGAGTAAC | 69 | E51SaCas9KKH | TAGCTCCTACTCAGACTGT |
| | 21 | AGT | | 43 | TAC |
| 48 | E51SaCas9KKH | GAGTAACAGTCTGAGTAGG | 53 | E51SaCas9KKH | TCAACGAGATGATCATCAA |
| | 22 | AGC | | 27 | GCA |
| 48 | E51SaCas9KKH | GAGTAACAGTCTGAGTAGG | 54 | E51SaCas9KKH | GTGACCTTGAGGATATCAA |
| | 22 | AGC | | 28 | CGA |
| 48 | E51SaCas9KKH | GAGTAACAGTCTGAGTAGG | 55 | E51SaCas9KKH | TGGGTGACCTTGAGGATAT |
| | 22 | AGC | | 29 | CAA |
| 48 | E51SaCas9KKH | GAGTAACAGTCTGAGTAGG | 56 | E51SaCas9KKH | GAGGGTGATGGTGGGTGAC |
| | 22 | AGC | | 30 | CTT |
| 48 | E51SaCas9KKH | GAGTAACAGTCTGAGTAGG | 57 | E51SaCas9KKH | TATAAAATCACAGAGGGTG |
| | 22 | AGC | | 31 | ATG |
| 48 | E51SaCas9KKH | GAGTAACAGTCTGAGTAGG | 58 | E51SaCas9KKH | AAGTTATAAAATCACAGAG |
| | 22 | AGC | | 32 | GGT |
| 48 | E51SaCas9KKH | GAGTAACAGTCTGAGTAGG | 59 | E51SaCas9KKH | ATCAAGTTATAAAATCACA |
| | 22 | AGC | | 33 | GAG |
| 48 | E51SaCas9KKH | GAGTAACAGTCTGAGTAGG | 60 | E51SaCas9KKH | TTGATCAAGTTATAAAATC |
| | 22 | AGC | | 34 | ACA |
| 48 | E51SaCas9KKH | GAGTAACAGTCTGAGTAGG | 61 | E51SaCas9KKH | CTTTCTCTGCTTGATCAAG |
| | 22 | AGC | | 35 | TTA |
| 48 | E51SaCas9KKH | GAGTAACAGTCTGAGTAGG | 62 | E51SaCas9KKH | CCGACTGGCTTTCTCTGCT |
| | 22 | AGC | | 36 | TGA |
| 48 | E51SaCas9KKH | GAGTAACAGTCTGAGTAGG | 63 | E51SaCas9KKH | ACTTACCGACTGGCTTTCT |
| | 22 | AGC | | 37 | CTG |
| 48 | E51SaCas9KKH | GAGTAACAGTCTGAGTAGG | 64 | E51SaCas9KKH | GATGTTGGAGGTACCTGCT |
| | 22 | AGC | | 38 | CTG |
| 48 | E51SaCas9KKH | GAGTAACAGTCTGAGTAGG | 65 | E51SaCas9KKH | AAATGCCATCTTCCTTGAT |
| | 22 | AGC | | 39 | GTT |
| 48 | E51SaCas9KKH | GAGTAACAGTCTGAGTAGG | 66 | E51SaCas9KKH | CCAAACTAGAAATGCCATC |
| | 22 | AGC | | 40 | TTC |
| 48 | E51SaCas9KKH | GAGTAACAGTCTGAGTAGG | 67 | E51SaCas9KKH | AGGAAACTGCCATCTCCAA |
| | 22 | AGC | | 41 | ACT |
| 48 | E51SaCas9KKH | GAGTAACAGTCTGAGTAGG | 68 | E51SaCas9KKH | CTGTTACTCTGGTGACACA |
| | 22 | AGC | | 42 | ACC |
| 48 | E51SaCas9KKH | GAGTAACAGTCTGAGTAGG | 69 | E51SaCas9KKH | TAGCTCCTACTCAGACTGT |
| | 22 | AGC | | 43 | TAC |
| 53 | E51SaCas9KKH | TCAACGAGATGATCATCAA | 54 | E51SaCas9KKH | GTGACCTTGAGGATATCAA |
| | 27 | GCA | | 28 | CGA |
| 53 | E51SaCas9KKH | TCAACGAGATGATCATCAA | 55 | E51SaCas9KKH | TGGGTGACCTTGAGGATAT |
| | 27 | GCA | | 29 | CAA |
| 53 | E51SaCas9KKH | TCAACGAGATGATCATCAA | 56 | E51SaCas9KKH | GAGGGTGATGGTGGGTGAC |
| | 27 | GCA | | 30 | CTT |
| 53 | E51SaCas9KKH | TCAACGAGATGATCATCAA | 57 | E51SaCas9KKH | TATAAAATCACAGAGGGTG |
| | 27 | GCA | | 31 | ATG |
| 53 | E51SaCas9KKH | TCAACGAGATGATCATCAA | 58 | E51SaCas9KKH | AAGTTATAAAATCACAGAG |
| | 27 | GCA | | 32 | GGT |
| 53 | E51SaCas9KKH | TCAACGAGATGATCATCAA | 59 | E51SaCas9KKH | ATCAAGTTATAAAATCACA |
| | 27 | GCA | | 33 | GAG |
| 53 | E51SaCas9KKH | TCAACGAGATGATCATCAA | 60 | E51SaCas9KKH | TTGATCAAGTTATAAAATC |
| | 27 | GCA | | 34 | ACA |
| 53 | E51SaCas9KKH | TCAACGAGATGATCATCAA | 61 | E51SaCas9KKH | CTTTCTCTGCTTGATCAAG |
| | 27 | GCA | | 35 | TTA |
| 53 | E51SaCas9KKH | TCAACGAGATGATCATCAA | 62 | E51SaCas9KKH | CCGACTGGCTTTCTCTGCT |
| | 27 | GCA | | 36 | TGA |
| 53 | E51SaCas9KKH | TCAACGAGATGATCATCAA | 63 | E51SaCas9KKH | ACTTACCGACTGGCTTTCT |
| | 27 | GCA | | 37 | CTG |
| 53 | E51SaCas9KKH | TCAACGAGATGATCATCAA | 64 | E51SaCas9KKH | GATGTTGGAGGTACCTGCT |
| | 27 | GCA | | 38 | CTG |
| 53 | E51SaCas9KKH | TCAACGAGATGATCATCAA | 65 | E51SaCas9KKH | AAATGCCATCTTCCTTGAT |
| | 27 | GCA | | 39 | GTT |
| 53 | E51SaCas9KKH | TCAACGAGATGATCATCAA | 66 | E51SaCas9KKH | CCAAACTAGAAATGCCATC |
| | 27 | GCA | | 40 | TTC |
| 53 | E51SaCas9KKH | TCAACGAGATGATCATCAA | 67 | E51SaCas9KKH | AGGAAACTGCCATCTCCAA |
| | 27 | GCA | | 41 | ACT |
| 53 | E51SaCas9KKH | TCAACGAGATGATCATCAA | 68 | E51SaCas9KKH | CTGTTACTCTGGTGACACA |
| | 27 | GCA | | 42 | ACC |
| 53 | E51SaCas9KKH | TCAACGAGATGATCATCAA | 69 | E51SaCas9KKH | TAGCTCCTACTCAGACTGT |
| | 27 | GCA | | 43 | TAC |
| 54 | E51SaCas9KKH | GTGACCTTGAGGATATCAA | 55 | E51SaCas9KKH | TGGGTGACCTTGAGGATAT |
| | 28 | CGA | | 29 | CAA |
| 54 | E51SaCas9KKH | GTGACCTTGAGGATATCAA | 56 | E51SaCas9KKH | GAGGGTGATGGTGGGTGAC |
| | 28 | CGA | | 30 | CTT |
| 54 | E51SaCas9KKH | GTGACCTTGAGGATATCAA | 57 | E51SaCas9KKH | TATAAAATCACAGAGGGTG |
| | 28 | CGA | | 31 | ATG |
| 54 | E51SaCas9KKH | GTGACCTTGAGGATATCAA | 58 | E51SaCas9KKH | AAGTTATAAAATCACAGAG |
| | 28 | CGA | | 32 | GGT |
| 54 | E51SaCas9KKH | GTGACCTTGAGGATATCAA | 59 | E51SaCas9KKH | ATCAAGTTATAAAATCACA |
| | 28 | CGA | | 33 | GAG |
| 54 | E51SaCas9KKH | GTGACCTTGAGGATATCAA | 60 | E51SaCas9KKH | TTGATCAAGTTATAAAATC |
| | 28 | CGA | | 34 | ACA |
| 54 | E51SaCas9KKH | GTGACCTTGAGGATATCAA | 61 | E51SaCas9KKH | CTTTCTCTGCTTGATCAAG |
| | 28 | CGA | | 35 | TTA |
| 54 | E51SaCas9KKH | GTGACCTTGAGGATATCAA | 62 | E51SaCas9KKH | CCGACTGGCTTTCTCTGCT |
| | 28 | CGA | | 36 | TGA |
| 54 | E51SaCas9KKH | GTGACCTTGAGGATATCAA | 63 | E51SaCas9KKH | ACTTACCGACTGGCTTTCT |
| | 28 | CGA | | 37 | CTG |
| 54 | E51SaCas9KKH | GTGACCTTGAGGATATCAA | 64 | E51SaCas9KKH | GATGTTGGAGGTACCTGCT |
| | 28 | CGA | | 38 | CTG |
| 54 | E51SaCas9KKH | GTGACCTTGAGGATATCAA | 65 | E51SaCas9KKH | AAATGCCATCTTCCTTGAT |
| | 28 | CGA | | 39 | GTT |
| 54 | E51SaCas9KKH | GTGACCTTGAGGATATCAA | 66 | E51SaCas9KKH | CCAAACTAGAAATGCCATC |
| | 28 | CGA | | 40 | TTC |
| 54 | E51SaCas9KKH | GTGACCTTGAGGATATCAA | 67 | E51SaCas9KKH | AGGAAACTGCCATCTCCAA |
| | 28 | CGA | | 41 | ACT |
| 54 | E51SaCas9KKH | GTGACCTTGAGGATATCAA | 68 | E51SaCas9KKH | CTGTTACTCTGGTGACACA |
| | 28 | CGA | | 42 | ACC |
| 54 | E51SaCas9KKH | GTGACCTTGAGGATATCAA | 69 | E51SaCas9KKH | TAGCTCCTACTCAGACTGT |
| | 28 | CGA | | 43 | TAC |
| 55 | E51SaCas9KKH | TGGGTGACCTTGAGGATAT | 56 | E51SaCas9KKH | GAGGGTGATGGTGGGTGAC |
| | 29 | CAA | | 30 | CTT |
| 55 | E51SaCas9KKH | TGGGTGACCTTGAGGATAT | 57 | E51SaCas9KKH | TATAAAATCACAGAGGGTG |
| | 29 | CAA | | 31 | ATG |
| 55 | E51SaCas9KKH | TGGGTGACCTTGAGGATAT | 58 | E51SaCas9KKH | AAGTTATAAAATCACAGAG |
| | 29 | CAA | | 32 | GGT |
| 55 | E51SaCas9KKH | TGGGTGACCTTGAGGATAT | 59 | E51SaCas9KKH | ATCAAGTTATAAAATCACA |
| | 29 | CAA | | 33 | GAG |
| 55 | E51SaCas9KKH | TGGGTGACCTTGAGGATAT | 60 | E51SaCas9KKH | TTGATCAAGTTATAAAATC |
| | 29 | CAA | | 34 | ACA |
| 55 | E51SaCas9KKH | TGGGTGACCTTGAGGATAT | 61 | E51SaCas9KKH | CTTTCTCTGCTTGATCAAG |
| | 29 | CAA | | 35 | TTA |
| 55 | E51SaCas9KKH | TGGGTGACCTTGAGGATAT | 62 | E51SaCas9KKH | CCGACTGGCTTTCTCTGCT |
| | 29 | CAA | | 36 | TGA |
| 55 | E51SaCas9KKH | TGGGTGACCTTGAGGATAT | 63 | E51SaCas9KKH | ACTTACCGACTGGCTTTCT |
| | 29 | CAA | | 37 | CTG |
| 55 | E51SaCas9KKH | TGGGTGACCTTGAGGATAT | 64 | E51SaCas9KKH | GATGTTGGAGGTACCTGCT |
| | 29 | CAA | | 38 | CTG |
| 55 | E51SaCas9KKH | TGGGTGACCTTGAGGATAT | 65 | E51SaCas9KKH | AAATGCCATCTTCCTTGAT |
| | 29 | CAA | | 39 | GTT |
| 55 | E51SaCas9KKH | TGGGTGACCTTGAGGATAT | 66 | E51SaCas9KKH | CCAAACTAGAAATGCCATC |
| | 29 | CAA | | 40 | TTC |
| 55 | E51SaCas9KKH | TGGGTGACCTTGAGGATAT | 67 | E51SaCas9KKH | AGGAAACTGCCATCTCCAA |
| | 29 | CAA | | 41 | ACT |
| 55 | E51SaCas9KKH | TGGGTGACCTTGAGGATAT | 68 | E51SaCas9KKH | CTGTTACTCTGGTGACACA |
| | 29 | CAA | | 42 | ACC |
| 55 | E51SaCas9KKH | TGGGTGACCTTGAGGATAT | 69 | E51SaCas9KKH | TAGCTCCTACTCAGACTGT |
| | 29 | CAA | | 43 | TAC |
| 56 | E51SaCas9KKH | GAGGGTGATGGTGGGTGAC | 57 | E51SaCas9KKH | TATAAAATCACAGAGGGTG |
| | 30 | CTT | | 31 | ATG |
| 56 | E51SaCas9KKH | GAGGGTGATGGTGGGTGAC | 58 | E51SaCas9KKH | AAGTTATAAAATCACAGAG |
| | 30 | CTT | | 32 | GGT |
| 56 | E51SaCas9KKH | GAGGGTGATGGTGGGTGAC | 59 | E51SaCas9KKH | ATCAAGTTATAAAATCACA |
| | 30 | CTT | | 33 | GAG |
| 56 | E51SaCas9KKH | GAGGGTGATGGTGGGTGAC | 60 | E51SaCas9KKH | TTGATCAAGTTATAAAATC |
| | 30 | CTT | | 34 | ACA |
| 56 | E51SaCas9KKH | GAGGGTGATGGTGGGTGAC | 61 | E51SaCas9KKH | CTTTCTCTGCTTGATCAAG |
| | 30 | CTT | | 35 | TTA |
| 56 | E51SaCas9KKH | GAGGGTGATGGTGGGTGAC | 62 | E51SaCas9KKH | CCGACTGGCTTTCTCTGCT |
| | 30 | CTT | | 36 | TGA |
| 56 | E51SaCas9KKH | GAGGGTGATGGTGGGTGAC | 63 | E51SaCas9KKH | ACTTACCGACTGGCTTTCT |
| | 30 | CTT | | 37 | CTG |
| 56 | E51SaCas9KKH | GAGGGTGATGGTGGGTGAC | 64 | E51SaCas9KKH | GATGTTGGAGGTACCTGCT |
| | 30 | CTT | | 38 | CTG |
| 56 | E51SaCas9KKH | GAGGGTGATGGTGGGTGAC | 65 | E51SaCas9KKH | AAATGCCATCTTCCTTGAT |
| | 30 | CTT | | 39 | GTT |
| 56 | E51SaCas9KKH | GAGGGTGATGGTGGGTGAC | 66 | E51SaCas9KKH | CCAAACTAGAAATGCCATC |
| | 30 | CTT | | 40 | TTC |
| 56 | E51SaCas9KKH | GAGGGTGATGGTGGGTGAC | 67 | E51SaCas9KKH | AGGAAACTGCCATCTCCAA |
| | 30 | CTT | | 41 | ACT |
| 56 | E51SaCas9KKH | GAGGGTGATGGTGGGTGAC | 68 | E51SaCas9KKH | CTGTTACTCTGGTGACACA |
| | 30 | CTT | | 42 | ACC |
| 56 | E51SaCas9KKH | GAGGGTGATGGTGGGTGAC | 69 | E51SaCas9KKH | TAGCTCCTACTCAGACTGT |
| | 30 | CTT | | 43 | TAC |
| 57 | E51SaCas9KKH | TATAAAATCACAGAGGGTG | 58 | E51SaCas9KKH | AAGTTATAAAATCACAGAG |
| | 31 | ATG | | 32 | GGT |
| 57 | E51SaCas9KKH | TATAAAATCACAGAGGGTG | 59 | E51SaCas9KKH | ATCAAGTTATAAAATCACA |
| | 31 | ATG | | 33 | GAG |
| 57 | E51SaCas9KKH | TATAAAATCACAGAGGGTG | 60 | E51SaCas9KKH | TTGATCAAGTTATAAAATC |
| | 31 | ATG | | 34 | ACA |
| 57 | E51SaCas9KKH | TATAAAATCACAGAGGGTG | 61 | E51SaCas9KKH | CTTTCTCTGCTTGATCAAG |
| | 31 | ATG | | 35 | TTA |
| 57 | E51SaCas9KKH | TATAAAATCACAGAGGGTG | 62 | E51SaCas9KKH | CCGACTGGCTTTCTCTGCT |
| | 31 | ATG | | 36 | TGA |
| 57 | E51SaCas9KKH | TATAAAATCACAGAGGGTG | 63 | E51SaCas9KKH | ACTTACCGACTGGCTTTCT |
| | 31 | ATG | | 37 | CTG |
| 57 | E51SaCas9KKH | TATAAAATCACAGAGGGTG | 64 | E51SaCas9KKH | GATGTTGGAGGTACCTGCT |
| | 31 | ATG | | 38 | CTG |
| 57 | E51SaCas9KKH | TATAAAATCACAGAGGGTG | 65 | E51SaCas9KKH | AAATGCCATCTTCCTTGAT |
| | 31 | ATG | | 39 | GTT |
| 57 | E51SaCas9KKH | TATAAAATCACAGAGGGTG | 66 | E51SaCas9KKH | CCAAACTAGAAATGCCATC |
| | 31 | ATG | | 40 | TTC |
| 57 | E51SaCas9KKH | TATAAAATCACAGAGGGTG | 67 | E51SaCas9KKH | AGGAAACTGCCATCTCCAA |
| | 31 | ATG | | 41 | ACT |
| 57 | E51SaCas9KKH | TATAAAATCACAGAGGGTG | 68 | E51SaCas9KKH | CTGTTACTCTGGTGACACA |
| | 31 | ATG | | 42 | ACC |
| 57 | E51SaCas9KKH | TATAAAATCACAGAGGGTG | 69 | E51SaCas9KKH | TAGCTCCTACTCAGACTGT |
| | 31 | ATG | | 43 | TAC |
| 58 | E51SaCas9KKH | AAGTTATAAAATCACAGAG | 59 | E51SaCas9KKH | ATCAAGTTATAAAATCACA |
| | 32 | GGT | | 33 | GAG |
| 58 | E51SaCas9KKH | AAGTTATAAAATCACAGAG | 60 | E51SaCas9KKH | TTGATCAAGTTATAAAATC |
| | 32 | GGT | | 34 | ACA |
| 58 | E51SaCas9KKH | AAGTTATAAAATCACAGAG | 61 | E51SaCas9KKH | CTTTCTCTGCTTGATCAAG |
| | 32 | GGT | | 35 | TTA |
| 58 | E51SaCas9KKH | AAGTTATAAAATCACAGAG | 62 | E51SaCas9KKH | CCGACTGGCTTTCTCTGCT |
| | 32 | GGT | | 36 | TGA |
| 58 | E51SaCas9KKH | AAGTTATAAAATCACAGAG | 63 | E51SaCas9KKH | ACTTACCGACTGGCTTTCT |
| | 32 | GGT | | 37 | CTG |
| 58 | E51SaCas9KKH | AAGTTATAAAATCACAGAG | 64 | E51SaCas9KKH | GATGTTGGAGGTACCTGCT |
| | 32 | GGT | | 38 | CTG |
| 58 | E51SaCas9KKH | AAGTTATAAAATCACAGAG | 65 | E51SaCas9KKH | AAATGCCATCTTCCTTGAT |
| | 32 | GGT | | 39 | GTT |
| 58 | E51SaCas9KKH | AAGTTATAAAATCACAGAG | 66 | E51SaCas9KKH | CCAAACTAGAAATGCCATC |
| | 32 | GGT | | 40 | TTC |
| 58 | E51SaCas9KKH | AAGTTATAAAATCACAGAG | 67 | E51SaCas9KKH | AGGAAACTGCCATCTCCAA |
| | 32 | GGT | | 41 | ACT |
| 58 | E51SaCas9KKH | AAGTTATAAAATCACAGAG | 68 | E51SaCas9KKH | CTGTTACTCTGGTGACACA |
| | 32 | GGT | | 42 | ACC |
| 58 | E51SaCas9KKH | AAGTTATAAAATCACAGAG | 69 | E51SaCas9KKH | TAGCTCCTACTCAGACTGT |
| | 32 | GGT | | 43 | TAC |
| 59 | E51SaCas9KKH | ATCAAGTTATAAAATCACA | 60 | E51SaCas9KKH | TTGATCAAGTTATAAAATC |
| | 33 | GAG | | 34 | ACA |
| 59 | E51SaCas9KKH | ATCAAGTTATAAAATCACA | 61 | E51SaCas9KKH | CTTTCTCTGCTTGATCAAG |
| | 33 | GAG | | 35 | TTA |
| 59 | E51SaCas9KKH | ATCAAGTTATAAAATCACA | 62 | E51SaCas9KKH | CCGACTGGCTTTCTCTGCT |
| | 33 | GAG | | 36 | TGA |
| 59 | E51SaCas9KKH | ATCAAGTTATAAAATCACA | 63 | E51SaCas9KKH | ACTTACCGACTGGCTTTCT |
| | 33 | GAG | | 37 | CTG |
| 59 | E51SaCas9KKH | ATCAAGTTATAAAATCACA | 64 | E51SaCas9KKH | GATGTTGGAGGTACCTGCT |
| | 33 | GAG | | 38 | CTG |
| 59 | E51SaCas9KKH | ATCAAGTTATAAAATCACA | 65 | E51SaCas9KKH | AAATGCCATCTTCCTTGAT |
| | 33 | GAG | | 39 | GTT |
| 59 | E51SaCas9KKH | ATCAAGTTATAAAATCACA | 66 | E51SaCas9KKH | CCAAACTAGAAATGCCATC |
| | 33 | GAG | | 40 | TTC |
| 59 | E51SaCas9KKH | ATCAAGTTATAAAATCACA | 67 | E51SaCas9KKH | AGGAAACTGCCATCTCCAA |
| | 33 | GAG | | 41 | ACT |
| 59 | E51SaCas9KKH | ATCAAGTTATAAAATCACA | 68 | E51SaCas9KKH | CTGTTACTCTGGTGACACA |
| | 33 | GAG | | 42 | ACC |
| 59 | E51SaCas9KKH | ATCAAGTTATAAAATCACA | 69 | E51SaCas9KKH | TAGCTCCTACTCAGACTGT |
| | 33 | GAG | | 43 | TAC |
| 60 | E51SaCas9KKH | TTGATCAAGTTATAAAATC | 61 | E51SaCas9KKH | CTTTCTCTGCTTGATCAAG |
| | 34 | ACA | | 35 | TTA |
| 60 | E51SaCas9KKH | TTGATCAAGTTATAAAATC | 62 | E51SaCas9KKH | CCGACTGGCTTTCTCTGCT |
| | 34 | ACA | | 36 | TGA |
| 60 | E51SaCas9KKH | TTGATCAAGTTATAAAATC | 63 | E51SaCas9KKH | ACTTACCGACTGGCTTTCT |
| | 34 | ACA | | 37 | CTG |
| 60 | E51SaCas9KKH | TTGATCAAGTTATAAAATC | 64 | E51SaCas9KKH | GATGTTGGAGGTACCTGCT |
| | 34 | ACA | | 38 | CTG |
| 60 | E51SaCas9KKH | TTGATCAAGTTATAAAATC | 65 | E51SaCas9KKH | AAATGCCATCTTCCTTGAT |
| | 34 | ACA | | 39 | GTT |
| 60 | E51SaCas9KKH | TTGATCAAGTTATAAAATC | 66 | E51SaCas9KKH | CCAAACTAGAAATGCCATC |
| | 34 | ACA | | 40 | TTC |
| 60 | E51SaCas9KKH | TTGATCAAGTTATAAAATC | 67 | E51SaCas9KKH | AGGAAACTGCCATCTCCAA |
| | 34 | ACA | | 41 | ACT |
| 60 | E51SaCas9KKH | TTGATCAAGTTATAAAATC | 68 | E51SaCas9KKH | CTGTTACTCTGGTGACACA |
| | 34 | ACA | | 42 | ACC |
| 60 | E51SaCas9KKH | TTGATCAAGTTATAAAATC | 69 | E51SaCas9KKH | TAGCTCCTACTCAGACTGT |
| | 34 | ACA | | 43 | TAC |
| 61 | E51SaCas9KKH | CTTTCTCTGCTTGATCAAG | 62 | E51SaCas9KKH | CCGACTGGCTTTCTCTGCT |
| | 35 | TTA | | 36 | TGA |
| 61 | E51SaCas9KKH | CTTTCTCTGCTTGATCAAG | 63 | E51SaCas9KKH | ACTTACCGACTGGCTTTCT |
| | 35 | TTA | | 37 | CTG |
| 61 | E51SaCas9KKH | CTTTCTCTGCTTGATCAAG | 64 | E51SaCas9KKH | GATGTTGGAGGTACCTGCT |
| | 35 | TTA | | 38 | CTG |
| 61 | E51SaCas9KKH | CTTTCTCTGCTTGATCAAG | 65 | E51SaCas9KKH | AAATGCCATCTTCCTTGAT |
| | 35 | TTA | | 39 | GTT |
| 61 | E51SaCas9KKH | CTTTCTCTGCTTGATCAAG | 66 | E51SaCas9KKH | CCAAACTAGAAATGCCATC |
| | 35 | TTA | | 40 | TTC |
| 61 | E51SaCas9KKH | CTTTCTCTGCTTGATCAAG | 67 | E51SaCas9KKH | AGGAAACTGCCATCTCCAA |
| | 35 | TTA | | 41 | ACT |
| 61 | E51SaCas9KKH | CTTTCTCTGCTTGATCAAG | 68 | E51SaCas9KKH | CTGTTACTCTGGTGACACA |
| | 35 | TTA | | 42 | ACC |
| 61 | E51SaCas9KKH | CTTTCTCTGCTTGATCAAG | 69 | E51SaCas9KKH | TAGCTCCTACTCAGACTGT |
| | 35 | TTA | | 43 | TAC |
| 62 | E51SaCas9KKH | CCGACTGGCTTTCTCTGCT | 63 | E51SaCas9KKH | ACTTACCGACTGGCTTTCT |
| | 36 | TGA | | 37 | CTG |
| 62 | E51SaCas9KKH | CCGACTGGCTTTCTCTGCT | 64 | E51SaCas9KKH | GATGTTGGAGGTACCTGCT |
| | 36 | TGA | | 38 | CTG |
| 62 | E51SaCas9KKH | CCGACTGGCTTTCTCTGCT | 65 | E51SaCas9KKH | AAATGCCATCTTCCTTGAT |
| | 36 | TGA | | 39 | GTT |
| 62 | E51SaCas9KKH | CCGACTGGCTTTCTCTGCT | 66 | E51SaCas9KKH | CCAAACTAGAAATGCCATC |
| | 36 | TGA | | 40 | TTC |
| 62 | E51SaCas9KKH | CCGACTGGCTTTCTCTGCT | 67 | E51SaCas9KKH | AGGAAACTGCCATCTCCAA |
| | 36 | TGA | | 41 | ACT |
| 62 | E51SaCas9KKH | CCGACTGGCTTTCTCTGCT | 68 | E51SaCas9KKH | CTGTTACTCTGGTGACACA |
| | 36 | TGA | | 42 | ACC |
| 62 | E51SaCas9KKH | CCGACTGGCTTTCTCTGCT | 69 | E51SaCas9KKH | TAGCTCCTACTCAGACTGT |
| | 36 | TGA | | 43 | TAC |
| 63 | E51SaCas9KKH | ACTTACCGACTGGCTTTCT | 64 | E51SaCas9KKH | GATGTTGGAGGTACCTGCT |
| | 37 | CTG | | 38 | CTG |
| 63 | E51SaCas9KKH | ACTTACCGACTGGCTTTCT | 65 | E51SaCas9KKH | AAATGCCATCTTCCTTGAT |
| | 37 | CTG | | 39 | GTT |
| 63 | E51SaCas9KKH | ACTTACCGACTGGCTTTCT | 66 | E51SaCas9KKH | CCAAACTAGAAATGCCATC |
| | 37 | CTG | | 40 | TTC |
| 63 | E51SaCas9KKH | ACTTACCGACTGGCTTTCT | 67 | E51SaCas9KKH | AGGAAACTGCCATCTCCAA |
| | 37 | CTG | | 41 | ACT |
| 63 | E51SaCas9KKH | ACTTACCGACTGGCTTTCT | 68 | E51SaCas9KKH | CTGTTACTCTGGTGACACA |
| | 37 | CTG | | 42 | ACC |
| 63 | E51SaCas9KKH | ACTTACCGACTGGCTTTCT | 69 | E51SaCas9KKH | TAGCTCCTACTCAGACTGT |
| | 37 | CTG | | 43 | TAC |
| 64 | E51SaCas9KKH | GATGTTGGAGGTACCTGCT | 65 | E51SaCas9KKH | AAATGCCATCTTCCTTGAT |
| | 38 | CTG | | 39 | GTT |
| 64 | E51SaCas9KKH | GATGTTGGAGGTACCTGCT | 66 | E51SaCas9KKH | CCAAACTAGAAATGCCATC |
| | 38 | CTG | | 40 | TTC |
| 64 | E51SaCas9KKH | GATGTTGGAGGTACCTGCT | 67 | E51SaCas9KKH | AGGAAACTGCCATCTCCAA |
| | 38 | CTG | | 41 | ACT |
| 64 | E51SaCas9KKH | GATGTTGGAGGTACCTGCT | 68 | E51SaCas9KKH | CTGTTACTCTGGTGACACA |
| | 38 | CTG | | 42 | ACC |
| 64 | E51SaCas9KKH | GATGTTGGAGGTACCTGCT | 69 | E51SaCas9KKH | TAGCTCCTACTCAGACTGT |
| | 38 | CTG | | 43 | TAC |
| 65 | E51SaCas9KKH | AAATGCCATCTTCCTTGAT | 66 | E51SaCas9KKH | CCAAACTAGAAATGCCATC |
| | 39 | GTT | | 40 | TTC |
| 65 | E51SaCas9KKH | AAATGCCATCTTCCTTGAT | 67 | E51SaCas9KKH | AGGAAACTGCCATCTCCAA |
| | 39 | GTT | | 41 | ACT |
| 65 | E51SaCas9KKH | AAATGCCATCTTCCTTGAT | 68 | E51SaCas9KKH | CTGTTACTCTGGTGACACA |
| | 39 | GTT | | 42 | ACC |
| 65 | E51SaCas9KKH | AAATGCCATCTTCCTTGAT | 69 | E51SaCas9KKH | TAGCTCCTACTCAGACTGT |
| | 39 | GTT | | 43 | TAC |
| 66 | E51SaCas9KKH | CCAAACTAGAAATGCCATC | 67 | E51SaCas9KKH | AGGAAACTGCCATCTCCAA |
| | 40 | TTC | | 41 | ACT |
| 66 | E51SaCas9KKH | CCAAACTAGAAATGCCATC | 68 | E51SaCas9KKH | CTGTTACTCTGGTGACACA |
| | 40 | TTC | | 42 | ACC |
| 66 | E51SaCas9KKH | CCAAACTAGAAATGCCATC | 69 | E51SaCas9KKH | TAGCTCCTACTCAGACTGT |
| | 40 | TTC | | 43 | TAC |
| 67 | E51SaCas9KKH | AGGAAACTGCCATCTCCAA | 68 | E51SaCas9KKH | CTGTTACTCTGGTGACACA |
| | 41 | ACT | | 42 | ACC |
| 67 | E51SaCas9KKH | AGGAAACTGCCATCTCCAA | 69 | E51SaCas9KKH | TAGCTCCTACTCAGACTGT |
| | 41 | ACT | | 43 | TAC |
| 68 | E51SaCas9KKH | CTGTTACTCTGGTGACACA | 69 | E51SaCas9KKH | TAGCTCCTACTCAGACTGT |
| | 42 | ACC | | 43 | TAC |

TABLE 4C
(3). Exon 51 SluCas9 guides:

| Seq | Guide ID or | |
|---|---|---|
| ID No. | Guide RNA Name | Guide Sequence |
| 243 | E51Slu1 | TGATCATCTCGTTGATATCCTC |
| 244 | E51Slu2 | TTGATCAAGCAGAGAAAGCCAG |
| 245 | E51Slu3 | AGTCGGTAAGTTCTGTCCAAGC |
| 246 | E51Slu4 | GCCCGGTTGAAATCTGCCAGAG |
| 247 | E51Slu5 | CAGAGCAGGTACCTCCAACATC |
| 248 | E51Slu6 | GGTACCTCCAACATCAAGGAAG |
| 249 | E51Slu7 | CAAGGAAGATGGCATTTCTAGT |
| 250 | E51Slu8 | AGATGGCATTTCTAGTTTGGAG |
| 251 | E51Slu9 | ATGGCAGTTTCCTTAGTAACCA |
| 252 | E51Slu10 | GTCACCAGAGTAACAGTCTGAG |
| 253 | E51Slu15 | CAACGAGATGATCATCAAGCAG |
| 254 | E51Slu16 | GAGGGTGATGGTGGGTGACCTT |
| 255 | E51Slu17 | ATAAAATCACAGAGGGTGATGG |
| 256 | E51Slu18 | TATAAAATCACAGAGGGTGATG |
| 257 | E51Slu19 | AGTTATAAAATCACAGAGGGTG |
| 258 | E51Slu20 | TGATCAAGTTATAAAATCACAG |
| 259 | E51Slu21 | TTGATCAAGTTATAAAATCACA |
| 260 | E51Slu22 | GGGCTTGGACAGAACTTACCGA |
| 261 | E51Slu23 | CTCTGGCAGATTTCAACCGGGC |
| 262 | E51Slu24 | ACCTGCTCTGGCAGATTTCAAC |
| 263 | E51Slu25 | TACCTGCTCTGGCAGATTTCAA |
| 264 | E51Slu26 | CTTGATGTTGGAGGTACCTGCT |
| 265 | E51Slu27 | AATGCCATCTTCCTTGATGTTG |
| 266 | E51Slu28 | AGAAATGCCATCTTCCTTGATG |
| 267 | E51Slu29 | GGTGACACAACCTGTGGTTACT |
| 268 | E51Slu30 | TGTTACTCTGGTGACACAACCT |
| 269 | E51Slu31 | AGCTCCTACTCAGACTGTTACT |

TABLE 4D
(4). Exon 51 SluCas9 pairs:

| Guide 1 | | | Guide 2 | | |
|---|---|---|---|---|---|
| Seq ID | | | Seq ID | | |
| No. | Guide 1 | Guide 1 Sequence | No. | Guide 2 | Guide 2 Sequence |
| 243 | E51SL1 | TGATCATCTCGTTGATATCCTC | 244 | E51SL2 | TTGATCAAGCAGAGAAAGCCAG |
| 243 | E51SL1 | TGATCATCTCGTTGATATCCTC | 245 | E51SL3 | AGTCGGTAAGTTCTGTCCAAGC |
| 243 | E51SL1 | TGATCATCTCGTTGATATCCTC | 246 | E51SL4 | GCCCGGTTGAAATCTGCCAGAG |
| 243 | E51SL1 | TGATCATCTCGTTGATATCCTC | 247 | E51SL5 | CAGAGCAGGTACCTCCAACATC |
| 243 | E51SL1 | TGATCATCTCGTTGATATCCTC | 248 | E51SL6 | GGTACCTCCAACATCAAGGAAG |
| 243 | E51SL1 | TGATCATCTCGTTGATATCCTC | 249 | E51SL7 | CAAGGAAGATGGCATTTCTAGT |
| 243 | E51SL1 | TGATCATCTCGTTGATATCCTC | 250 | E51SL8 | AGATGGCATTTCTAGTTTGGAG |
| 243 | E51SL1 | TGATCATCTCGTTGATATCCTC | 251 | E51SL9 | ATGGCAGTTTCCTTAGTAACCA |
| 243 | E51SL1 | TGATCATCTCGTTGATATCCTC | 252 | E51SL10 | GTCACCAGAGTAACAGTCTGAG |
| 243 | E51SL1 | TGATCATCTCGTTGATATCCTC | 253 | E51SL15 | CAACGAGATGATCATCAAGCAG |
| 243 | E51SL1 | TGATCATCTCGTTGATATCCTC | 254 | E51SL16 | GAGGGTGATGGTGGGTGACCTT |
| 243 | E51SL1 | TGATCATCTCGTTGATATCCTC | 255 | E51SL17 | ATAAAATCACAGAGGGTGATGG |
| 243 | E51SL1 | TGATCATCTCGTTGATATCCTC | 256 | E51SL18 | TATAAAATCACAGAGGGTGATG |
| 243 | E51SL1 | TGATCATCTCGTTGATATCCTC | 257 | E51SL19 | AGTTATAAAATCACAGAGGGTG |
| 243 | E51SL1 | TGATCATCTCGTTGATATCCTC | 258 | E51SL20 | TGATCAAGTTATAAAATCACAG |
| 243 | E51SL1 | TGATCATCTCGTTGATATCCTC | 259 | E51SL21 | TTGATCAAGTTATAAAATCACA |
| 243 | E51SL1 | TGATCATCTCGTTGATATCCTC | 260 | E51SL22 | GGGCTTGGACAGAACTTACCGA |
| 243 | E51SL1 | TGATCATCTCGTTGATATCCTC | 261 | E51SL23 | CTCTGGCAGATTTCAACCGGGC |
| 243 | E51SL1 | TGATCATCTCGTTGATATCCTC | 262 | E51SL24 | ACCTGCTCTGGCAGATTTCAAC |
| 243 | E51SL1 | TGATCATCTCGTTGATATCCTC | 263 | E51SL25 | TACCTGCTCTGGCAGATTTCAA |
| 243 | E51SL1 | TGATCATCTCGTTGATATCCTC | 264 | E51SL26 | CTTGATGTTGGAGGTACCTGCT |
| 243 | E51SL1 | TGATCATCTCGTTGATATCCTC | 265 | E51SL27 | AATGCCATCTTCCTTGATGTTG |
| 243 | E51SL1 | TGATCATCTCGTTGATATCCTC | 266 | E51SL28 | AGAAATGCCATCTTCCTTGATG |
| 243 | E51SL1 | TGATCATCTCGTTGATATCCTC | 267 | E51SL29 | GGTGACACAACCTGTGGTTACT |
| 243 | E51SL1 | TGATCATCTCGTTGATATCCTC | 268 | E51SL30 | TGTTACTCTGGTGACACAACCT |
| 243 | E51SL1 | TGATCATCTCGTTGATATCCTC | 269 | E51SL31 | AGCTCCTACTCAGACTGTTACT |
| 244 | E51SL2 | TTGATCAAGCAGAGAAAGCCAG | 245 | E51SL3 | AGTCGGTAAGTTCTGTCCAAGC |
| 244 | E51SL2 | TTGATCAAGCAGAGAAAGCCAG | 246 | E51SL4 | GCCCGGTTGAAATCTGCCAGAG |
| 244 | E51SL2 | TTGATCAAGCAGAGAAAGCCAG | 247 | E51SL5 | CAGAGCAGGTACCTCCAACATC |
| 244 | E51SL2 | TTGATCAAGCAGAGAAAGCCAG | 248 | E51SL6 | GGTACCTCCAACATCAAGGAAG |
| 244 | E51SL2 | TTGATCAAGCAGAGAAAGCCAG | 249 | E51SL7 | CAAGGAAGATGGCATTTCTAGT |
| 244 | E51SL2 | TTGATCAAGCAGAGAAAGCCAG | 250 | E51SL8 | AGATGGCATTTCTAGTTTGGAG |
| 244 | E51SL2 | TTGATCAAGCAGAGAAAGCCAG | 251 | E51SL9 | ATGGCAGTTTCCTTAGTAACCA |
| 244 | E51SL2 | TTGATCAAGCAGAGAAAGCCAG | 252 | E51SL10 | GTCACCAGAGTAACAGTCTGAG |
| 244 | E51SL2 | TTGATCAAGCAGAGAAAGCCAG | 253 | E51SL15 | CAACGAGATGATCATCAAGCAG |
| 244 | E51SL2 | TTGATCAAGCAGAGAAAGCCAG | 254 | E51SL16 | GAGGGTGATGGTGGGTGACCTT |
| 244 | E51SL2 | TTGATCAAGCAGAGAAAGCCAG | 255 | E51SL17 | ATAAAATCACAGAGGGTGATGG |
| 244 | E51SL2 | TTGATCAAGCAGAGAAAGCCAG | 256 | E51SL18 | TATAAAATCACAGAGGGTGATG |
| 244 | E51SL2 | TTGATCAAGCAGAGAAAGCCAG | 257 | E51SL19 | AGTTATAAAATCACAGAGGGTG |
| 244 | E51SL2 | TTGATCAAGCAGAGAAAGCCAG | 258 | E51SL20 | TGATCAAGTTATAAAATCACAG |
| 244 | E51SL2 | TTGATCAAGCAGAGAAAGCCAG | 259 | E51SL21 | TTGATCAAGTTATAAAATCACA |
| 244 | E51SL2 | TTGATCAAGCAGAGAAAGCCAG | 260 | E51SL22 | GGGCTTGGACAGAACTTACCGA |
| 244 | E51SL2 | TTGATCAAGCAGAGAAAGCCAG | 261 | E51SL23 | CTCTGGCAGATTTCAACCGGGC |
| 244 | E51SL2 | TTGATCAAGCAGAGAAAGCCAG | 262 | E51SL24 | ACCTGCTCTGGCAGATTTCAAC |
| 244 | E51SL2 | TTGATCAAGCAGAGAAAGCCAG | 263 | E51SL25 | TACCTGCTCTGGCAGATTTCAA |
| 244 | E51SL2 | TTGATCAAGCAGAGAAAGCCAG | 264 | E51SL26 | CTTGATGTTGGAGGTACCTGCT |
| 244 | E51SL2 | TTGATCAAGCAGAGAAAGCCAG | 265 | E51SL27 | AATGCCATCTTCCTTGATGTTG |
| 244 | E51SL2 | TTGATCAAGCAGAGAAAGCCAG | 266 | E51SL28 | AGAAATGCCATCTTCCTTGATG |
| 244 | E51SL2 | TTGATCAAGCAGAGAAAGCCAG | 267 | E51SL29 | GGTGACACAACCTGTGGTTACT |
| 244 | E51SL2 | TTGATCAAGCAGAGAAAGCCAG | 268 | E51SL30 | TGTTACTCTGGTGACACAACCT |
| 244 | E51SL2 | TTGATCAAGCAGAGAAAGCCAG | 269 | E51SL31 | AGCTCCTACTCAGACTGTTACT |
| 245 | E51SL3 | AGTCGGTAAGTTCTGTCCAAGC | 246 | E51SL4 | GCCCGGTTGAAATCTGCCAGAG |
| 245 | E51SL3 | AGTCGGTAAGTTCTGTCCAAGC | 247 | E51SL5 | CAGAGCAGGTACCTCCAACATC |
| 245 | E51SL3 | AGTCGGTAAGTTCTGTCCAAGC | 248 | E51SL6 | GGTACCTCCAACATCAAGGAAG |
| 245 | E51SL3 | AGTCGGTAAGTTCTGTCCAAGC | 249 | E51SL7 | CAAGGAAGATGGCATTTCTAGT |
| 245 | E51SL3 | AGTCGGTAAGTTCTGTCCAAGC | 250 | E51SL8 | AGATGGCATTTCTAGTTTGGAG |
| 245 | E51SL3 | AGTCGGTAAGTTCTGTCCAAGC | 251 | E51SL9 | ATGGCAGTTTCCTTAGTAACCA |
| 245 | E51SL3 | AGTCGGTAAGTTCTGTCCAAGC | 252 | E51SL10 | GTCACCAGAGTAACAGTCTGAG |
| 245 | E51SL3 | AGTCGGTAAGTTCTGTCCAAGC | 253 | E51SL15 | CAACGAGATGATCATCAAGCAG |
| 245 | E51SL3 | AGTCGGTAAGTTCTGTCCAAGC | 254 | E51SL16 | GAGGGTGATGGTGGGTGACCTT |
| 245 | E51SL3 | AGTCGGTAAGTTCTGTCCAAGC | 255 | E51SL17 | ATAAAATCACAGAGGGTGATGG |
| 245 | E51SL3 | AGTCGGTAAGTTCTGTCCAAGC | 256 | E51SL18 | TATAAAATCACAGAGGGTGATG |
| 245 | E51SL3 | AGTCGGTAAGTTCTGTCCAAGC | 257 | E51SL19 | AGTTATAAAATCACAGAGGGTG |
| 245 | E51SL3 | AGTCGGTAAGTTCTGTCCAAGC | 258 | E51SL20 | TGATCAAGTTATAAAATCACAG |
| 245 | E51SL3 | AGTCGGTAAGTTCTGTCCAAGC | 259 | E51SL21 | TTGATCAAGTTATAAAATCACA |
| 245 | E51SL3 | AGTCGGTAAGTTCTGTCCAAGC | 260 | E51SL22 | GGGCTTGGACAGAACTTACCGA |
| 245 | E51SL3 | AGTCGGTAAGTTCTGTCCAAGC | 261 | E51SL23 | CTCTGGCAGATTTCAACCGGGC |
| 245 | E51SL3 | AGTCGGTAAGTTCTGTCCAAGC | 262 | E51SL24 | ACCTGCTCTGGCAGATTTCAAC |
| 245 | E51SL3 | AGTCGGTAAGTTCTGTCCAAGC | 263 | E51SL25 | TACCTGCTCTGGCAGATTTCAA |
| 245 | E51SL3 | AGTCGGTAAGTTCTGTCCAAGC | 264 | E51SL26 | CTTGATGTTGGAGGTACCTGCT |
| 245 | E51SL3 | AGTCGGTAAGTTCTGTCCAAGC | 265 | E51SL27 | AATGCCATCTTCCTTGATGTTG |
| 245 | E51SL3 | AGTCGGTAAGTTCTGTCCAAGC | 266 | E51SL28 | AGAAATGCCATCTTCCTTGATG |
| 245 | E51SL3 | AGTCGGTAAGTTCTGTCCAAGC | 267 | E51SL29 | GGTGACACAACCTGTGGTTACT |
| 245 | E51SL3 | AGTCGGTAAGTTCTGTCCAAGC | 268 | E51SL30 | TGTTACTCTGGTGACACAACCT |
| 245 | E51SL3 | AGTCGGTAAGTTCTGTCCAAGC | 269 | E51SL31 | AGCTCCTACTCAGACTGTTACT |
| 246 | E51SL4 | GCCCGGTTGAAATCTGCCAGAG | 247 | E51SL5 | CAGAGCAGGTACCTCCAACATC |
| 246 | E51SL4 | GCCCGGTTGAAATCTGCCAGAG | 248 | E51SL6 | GGTACCTCCAACATCAAGGAAG |
| 246 | E51SL4 | GCCCGGTTGAAATCTGCCAGAG | 249 | E51SL7 | CAAGGAAGATGGCATTTCTAGT |
| 246 | E51SL4 | GCCCGGTTGAAATCTGCCAGAG | 250 | E51SL8 | AGATGGCATTTCTAGTTTGGAG |
| 246 | E51SL4 | GCCCGGTTGAAATCTGCCAGAG | 251 | E51SL9 | ATGGCAGTTTCCTTAGTAACCA |
| 246 | E51SL4 | GCCCGGTTGAAATCTGCCAGAG | 252 | E51SL10 | GTCACCAGAGTAACAGTCTGAG |
| 246 | E51SL4 | GCCCGGTTGAAATCTGCCAGAG | 253 | E51SL15 | CAACGAGATGATCATCAAGCAG |
| 246 | E51SL4 | GCCCGGTTGAAATCTGCCAGAG | 254 | E51SL16 | GAGGGTGATGGTGGGTGACCTT |
| 246 | E51SL4 | GCCCGGTTGAAATCTGCCAGAG | 255 | E51SL17 | ATAAAATCACAGAGGGTGATGG |
| 246 | E51SL4 | GCCCGGTTGAAATCTGCCAGAG | 256 | E51SL18 | TATAAAATCACAGAGGGTGATG |
| 246 | E51SL4 | GCCCGGTTGAAATCTGCCAGAG | 257 | E51SL19 | AGTTATAAAATCACAGAGGGTG |
| 246 | E51SL4 | GCCCGGTTGAAATCTGCCAGAG | 258 | E51SL20 | TGATCAAGTTATAAAATCACAG |
| 246 | E51SL4 | GCCCGGTTGAAATCTGCCAGAG | 259 | E51SL21 | TTGATCAAGTTATAAAATCACA |
| 246 | E51SL4 | GCCCGGTTGAAATCTGCCAGAG | 260 | E51SL22 | GGGCTTGGACAGAACTTACCGA |
| 246 | E51SL4 | GCCCGGTTGAAATCTGCCAGAG | 261 | E51SL23 | CTCTGGCAGATTTCAACCGGGC |
| 246 | E51SL4 | GCCCGGTTGAAATCTGCCAGAG | 262 | E51SL24 | ACCTGCTCTGGCAGATTTCAAC |
| 246 | E51SL4 | GCCCGGTTGAAATCTGCCAGAG | 263 | E51SL25 | TACCTGCTCTGGCAGATTTCAA |
| 246 | E51SL4 | GCCCGGTTGAAATCTGCCAGAG | 264 | E51SL26 | CTTGATGTTGGAGGTACCTGCT |
| 246 | E51SL4 | GCCCGGTTGAAATCTGCCAGAG | 265 | E51SL27 | AATGCCATCTTCCTTGATGTTG |
| 246 | E51SL4 | GCCCGGTTGAAATCTGCCAGAG | 266 | E51SL28 | AGAAATGCCATCTTCCTTGATG |
| 246 | E51SL4 | GCCCGGTTGAAATCTGCCAGAG | 267 | E51SL29 | GGTGACACAACCTGTGGTTACT |
| 246 | E51SL4 | GCCCGGTTGAAATCTGCCAGAG | 268 | E51SL30 | TGTTACTCTGGTGACACAACCT |
| 246 | E51SL4 | GCCCGGTTGAAATCTGCCAGAG | 269 | E51SL31 | AGCTCCTACTCAGACTGTTACT |
| 247 | E51SL5 | CAGAGCAGGTACCTCCAACATC | 248 | E51SL6 | GGTACCTCCAACATCAAGGAAG |
| 247 | E51SL5 | CAGAGCAGGTACCTCCAACATC | 249 | E51SL7 | CAAGGAAGATGGCATTTCTAGT |
| 247 | E51SL5 | CAGAGCAGGTACCTCCAACATC | 250 | E51SL8 | AGATGGCATTTCTAGTTTGGAG |
| 247 | E51SL5 | CAGAGCAGGTACCTCCAACATC | 251 | E51SL9 | ATGGCAGTTTCCTTAGTAACCA |
| 247 | E51SL5 | CAGAGCAGGTACCTCCAACATC | 252 | E51SL10 | GTCACCAGAGTAACAGTCTGAG |
| 247 | E51SL5 | CAGAGCAGGTACCTCCAACATC | 253 | E51SL15 | CAACGAGATGATCATCAAGCAG |
| 247 | E51SL5 | CAGAGCAGGTACCTCCAACATC | 254 | E51SL16 | GAGGGTGATGGTGGGTGACCTT |
| 247 | E51SL5 | CAGAGCAGGTACCTCCAACATC | 255 | E51SL17 | ATAAAATCACAGAGGGTGATGG |
| 247 | E51SL5 | CAGAGCAGGTACCTCCAACATC | 256 | E51SL18 | TATAAAATCACAGAGGGTGATG |
| 247 | E51SL5 | CAGAGCAGGTACCTCCAACATC | 257 | E51SL19 | AGTTATAAAATCACAGAGGGTG |
| 247 | E51SL5 | CAGAGCAGGTACCTCCAACATC | 258 | E51SL20 | TGATCAAGTTATAAAATCACAG |
| 247 | E51SL5 | CAGAGCAGGTACCTCCAACATC | 259 | E51SL21 | TTGATCAAGTTATAAAATCACA |
| 247 | E51SL5 | CAGAGCAGGTACCTCCAACATC | 260 | E51SL22 | GGGCTTGGACAGAACTTACCGA |
| 247 | E51SL5 | CAGAGCAGGTACCTCCAACATC | 261 | E51SL23 | CTCTGGCAGATTTCAACCGGGC |
| 247 | E51SL5 | CAGAGCAGGTACCTCCAACATC | 262 | E51SL24 | ACCTGCTCTGGCAGATTTCAAC |
| 247 | E51SL5 | CAGAGCAGGTACCTCCAACATC | 263 | E51SL25 | TACCTGCTCTGGCAGATTTCAA |
| 247 | E51SL5 | CAGAGCAGGTACCTCCAACATC | 264 | E51SL26 | CTTGATGTTGGAGGTACCTGCT |
| 247 | E51SL5 | CAGAGCAGGTACCTCCAACATC | 265 | E51SL27 | AATGCCATCTTCCTTGATGTTG |
| 247 | E51SL5 | CAGAGCAGGTACCTCCAACATC | 266 | E51SL28 | AGAAATGCCATCTTCCTTGATG |
| 247 | E51SL5 | CAGAGCAGGTACCTCCAACATC | 267 | E51SL29 | GGTGACACAACCTGTGGTTACT |
| 247 | E51SL5 | CAGAGCAGGTACCTCCAACATC | 268 | E51SL30 | TGTTACTCTGGTGACACAACCT |
| 247 | E51SL5 | CAGAGCAGGTACCTCCAACATC | 269 | E51SL31 | AGCTCCTACTCAGACTGTTACT |
| 248 | E51SL6 | GGTACCTCCAACATCAAGGAAG | 249 | E51SL7 | CAAGGAAGATGGCATTTCTAGT |
| 248 | E51SL6 | GGTACCTCCAACATCAAGGAAG | 250 | E51SL8 | AGATGGCATTTCTAGTTTGGAG |
| 248 | E51SL6 | GGTACCTCCAACATCAAGGAAG | 251 | E51SL9 | ATGGCAGTTTCCTTAGTAACCA |
| 248 | E51SL6 | GGTACCTCCAACATCAAGGAAG | 252 | E51SL10 | GTCACCAGAGTAACAGTCTGAG |
| 248 | E51SL6 | GGTACCTCCAACATCAAGGAAG | 253 | E51SL15 | CAACGAGATGATCATCAAGCAG |
| 248 | E51SL6 | GGTACCTCCAACATCAAGGAAG | 254 | E51SL16 | GAGGGTGATGGTGGGTGACCTT |
| 248 | E51SL6 | GGTACCTCCAACATCAAGGAAG | 255 | E51SL17 | ATAAAATCACAGAGGGTGATGG |
| 248 | E51SL6 | GGTACCTCCAACATCAAGGAAG | 256 | E51SL18 | TATAAAATCACAGAGGGTGATG |
| 248 | E51SL6 | GGTACCTCCAACATCAAGGAAG | 257 | E51SL19 | AGTTATAAAATCACAGAGGGTG |
| 248 | E51SL6 | GGTACCTCCAACATCAAGGAAG | 258 | E51SL20 | TGATCAAGTTATAAAATCACAG |
| 248 | E51SL6 | GGTACCTCCAACATCAAGGAAG | 259 | E51SL21 | TTGATCAAGTTATAAAATCACA |
| 248 | E51SL6 | GGTACCTCCAACATCAAGGAAG | 260 | E51SL22 | GGGCTTGGACAGAACTTACCGA |
| 248 | E51SL6 | GGTACCTCCAACATCAAGGAAG | 261 | E51SL23 | CTCTGGCAGATTTCAACCGGGC |
| 248 | E51SL6 | GGTACCTCCAACATCAAGGAAG | 262 | E51SL24 | ACCTGCTCTGGCAGATTTCAAC |
| 248 | E51SL6 | GGTACCTCCAACATCAAGGAAG | 263 | E51SL25 | TACCTGCTCTGGCAGATTTCAA |
| 248 | E51SL6 | GGTACCTCCAACATCAAGGAAG | 264 | E51SL26 | CTTGATGTTGGAGGTACCTGCT |
| 248 | E51SL6 | GGTACCTCCAACATCAAGGAAG | 265 | E51SL27 | AATGCCATCTTCCTTGATGTTG |
| 248 | E51SL6 | GGTACCTCCAACATCAAGGAAG | 266 | E51SL28 | AGAAATGCCATCTTCCTTGATG |
| 248 | E51SL6 | GGTACCTCCAACATCAAGGAAG | 267 | E51SL29 | GGTGACACAACCTGTGGTTACT |
| 248 | E51SL6 | GGTACCTCCAACATCAAGGAAG | 268 | E51SL30 | TGTTACTCTGGTGACACAACCT |
| 248 | E51SL6 | GGTACCTCCAACATCAAGGAAG | 269 | E51SL31 | AGCTCCTACTCAGACTGTTACT |
| 249 | E51SL7 | CAAGGAAGATGGCATTTCTAGT | 250 | E51SL8 | AGATGGCATTTCTAGTTTGGAG |
| 249 | E51SL7 | CAAGGAAGATGGCATTTCTAGT | 251 | E51SL9 | ATGGCAGTTTCCTTAGTAACCA |
| 249 | E51SL7 | CAAGGAAGATGGCATTTCTAGT | 252 | E51SL10 | GTCACCAGAGTAACAGTCTGAG |
| 249 | E51SL7 | CAAGGAAGATGGCATTTCTAGT | 253 | E51SL15 | CAACGAGATGATCATCAAGCAG |
| 249 | E51SL7 | CAAGGAAGATGGCATTTCTAGT | 254 | E51SL16 | GAGGGTGATGGTGGGTGACCTT |
| 249 | E51SL7 | CAAGGAAGATGGCATTTCTAGT | 255 | E51SL17 | ATAAAATCACAGAGGGTGATGG |
| 249 | E51SL7 | CAAGGAAGATGGCATTTCTAGT | 256 | E51SL18 | TATAAAATCACAGAGGGTGATG |
| 249 | E51SL7 | CAAGGAAGATGGCATTTCTAGT | 257 | E51SL19 | AGTTATAAAATCACAGAGGGTG |
| 249 | E51SL7 | CAAGGAAGATGGCATTTCTAGT | 258 | E51SL20 | TGATCAAGTTATAAAATCACAG |
| 249 | E51SL7 | CAAGGAAGATGGCATTTCTAGT | 259 | E51SL21 | TTGATCAAGTTATAAAATCACA |
| 249 | E51SL7 | CAAGGAAGATGGCATTTCTAGT | 260 | E51SL22 | GGGCTTGGACAGAACTTACCGA |
| 249 | E51SL7 | CAAGGAAGATGGCATTTCTAGT | 261 | E51SL23 | CTCTGGCAGATTTCAACCGGGC |
| 249 | E51SL7 | CAAGGAAGATGGCATTTCTAGT | 262 | E51SL24 | ACCTGCTCTGGCAGATTTCAAC |
| 249 | E51SL7 | CAAGGAAGATGGCATTTCTAGT | 263 | E51SL25 | TACCTGCTCTGGCAGATTTCAA |
| 249 | E51SL7 | CAAGGAAGATGGCATTTCTAGT | 264 | E51SL26 | CTTGATGTTGGAGGTACCTGCT |
| 249 | E51SL7 | CAAGGAAGATGGCATTTCTAGT | 265 | E51SL27 | AATGCCATCTTCCTTGATGTTG |
| 249 | E51SL7 | CAAGGAAGATGGCATTTCTAGT | 266 | E51SL28 | AGAAATGCCATCTTCCTTGATG |
| 249 | E51SL7 | CAAGGAAGATGGCATTTCTAGT | 267 | E51SL29 | GGTGACACAACCTGTGGTTACT |
| 249 | E51SL7 | CAAGGAAGATGGCATTTCTAGT | 268 | E51SL30 | TGTTACTCTGGTGACACAACCT |
| 249 | E51SL7 | CAAGGAAGATGGCATTTCTAGT | 269 | E51SL31 | AGCTCCTACTCAGACTGTTACT |
| 250 | E51SL8 | AGATGGCATTTCTAGTTTGGAG | 251 | E51SL9 | ATGGCAGTTTCCTTAGTAACCA |
| 250 | E51SL8 | AGATGGCATTTCTAGTTTGGAG | 252 | E51SL10 | GTCACCAGAGTAACAGTCTGAG |
| 250 | E51SL8 | AGATGGCATTTCTAGTTTGGAG | 253 | E51SL15 | CAACGAGATGATCATCAAGCAG |
| 250 | E51SL8 | AGATGGCATTTCTAGTTTGGAG | 254 | E51SL16 | GAGGGTGATGGTGGGTGACCTT |
| 250 | E51SL8 | AGATGGCATTTCTAGTTTGGAG | 255 | E51SL17 | ATAAAATCACAGAGGGTGATGG |
| 250 | E51SL8 | AGATGGCATTTCTAGTTTGGAG | 256 | E51SL18 | TATAAAATCACAGAGGGTGATG |
| 250 | E51SL8 | AGATGGCATTTCTAGTTTGGAG | 257 | E51SL19 | AGTTATAAAATCACAGAGGGTG |
| 250 | E51SL8 | AGATGGCATTTCTAGTTTGGAG | 258 | E51SL20 | TGATCAAGTTATAAAATCACAG |
| 250 | E51SL8 | AGATGGCATTTCTAGTTTGGAG | 259 | E51SL21 | TTGATCAAGTTATAAAATCACA |
| 250 | E51SL8 | AGATGGCATTTCTAGTTTGGAG | 260 | E51SL22 | GGGCTTGGACAGAACTTACCGA |
| 250 | E51SL8 | AGATGGCATTTCTAGTTTGGAG | 261 | E51SL23 | CTCTGGCAGATTTCAACCGGGC |
| 250 | E51SL8 | AGATGGCATTTCTAGTTTGGAG | 262 | E51SL24 | ACCTGCTCTGGCAGATTTCAAC |
| 250 | E51SL8 | AGATGGCATTTCTAGTTTGGAG | 263 | E51SL25 | TACCTGCTCTGGCAGATTTCAA |
| 250 | E51SL8 | AGATGGCATTTCTAGTTTGGAG | 264 | E51SL26 | CTTGATGTTGGAGGTACCTGCT |
| 250 | E51SL8 | AGATGGCATTTCTAGTTTGGAG | 265 | E51SL27 | AATGCCATCTTCCTTGATGTTG |
| 250 | E51SL8 | AGATGGCATTTCTAGTTTGGAG | 266 | E51SL28 | AGAAATGCCATCTTCCTTGATG |
| 250 | E51SL8 | AGATGGCATTTCTAGTTTGGAG | 267 | E51SL29 | GGTGACACAACCTGTGGTTACT |
| 250 | E51SL8 | AGATGGCATTTCTAGTTTGGAG | 268 | E51SL30 | TGTTACTCTGGTGACACAACCT |
| 250 | E51SL8 | AGATGGCATTTCTAGTTTGGAG | 269 | E51SL31 | AGCTCCTACTCAGACTGTTACT |
| 251 | E51SL9 | ATGGCAGTTTCCTTAGTAACCA | 252 | E51SL10 | GTCACCAGAGTAACAGTCTGAG |
| 251 | E51SL9 | ATGGCAGTTTCCTTAGTAACCA | 253 | E51SL15 | CAACGAGATGATCATCAAGCAG |
| 251 | E51SL9 | ATGGCAGTTTCCTTAGTAACCA | 254 | E51SL16 | GAGGGTGATGGTGGGTGACCTT |
| 251 | E51SL9 | ATGGCAGTTTCCTTAGTAACCA | 255 | E51SL17 | ATAAAATCACAGAGGGTGATGG |
| 251 | E51SL9 | ATGGCAGTTTCCTTAGTAACCA | 256 | E51SL18 | TATAAAATCACAGAGGGTGATG |
| 251 | E51SL9 | ATGGCAGTTTCCTTAGTAACCA | 257 | E51SL19 | AGTTATAAAATCACAGAGGGTG |
| 251 | E51SL9 | ATGGCAGTTTCCTTAGTAACCA | 258 | E51SL20 | TGATCAAGTTATAAAATCACAG |
| 251 | E51SL9 | ATGGCAGTTTCCTTAGTAACCA | 259 | E51SL21 | TTGATCAAGTTATAAAATCACA |
| 251 | E51SL9 | ATGGCAGTTTCCTTAGTAACCA | 260 | E51SL22 | GGGCTTGGACAGAACTTACCGA |
| 251 | E51SL9 | ATGGCAGTTTCCTTAGTAACCA | 261 | E51SL23 | CTCTGGCAGATTTCAACCGGGC |
| 251 | E51SL9 | ATGGCAGTTTCCTTAGTAACCA | 262 | E51SL24 | ACCTGCTCTGGCAGATTTCAAC |
| 251 | E51SL9 | ATGGCAGTTTCCTTAGTAACCA | 263 | E51SL25 | TACCTGCTCTGGCAGATTTCAA |
| 251 | E51SL9 | ATGGCAGTTTCCTTAGTAACCA | 264 | E51SL26 | CTTGATGTTGGAGGTACCTGCT |
| 251 | E51SL9 | ATGGCAGTTTCCTTAGTAACCA | 265 | E51SL27 | AATGCCATCTTCCTTGATGTTG |
| 251 | E51SL9 | ATGGCAGTTTCCTTAGTAACCA | 266 | E51SL28 | AGAAATGCCATCTTCCTTGATG |
| 251 | E51SL9 | ATGGCAGTTTCCTTAGTAACCA | 267 | E51SL29 | GGTGACACAACCTGTGGTTACT |
| 251 | E51SL9 | ATGGCAGTTTCCTTAGTAACCA | 268 | E51SL30 | TGTTACTCTGGTGACACAACCT |
| 251 | E51SL9 | ATGGCAGTTTCCTTAGTAACCA | 269 | E51SL31 | AGCTCCTACTCAGACTGTTACT |
| 252 | E51SL10 | GTCACCAGAGTAACAGTCTGAG | 253 | E51SL15 | CAACGAGATGATCATCAAGCAG |
| 252 | E51SL10 | GTCACCAGAGTAACAGTCTGAG | 254 | E51SL16 | GAGGGTGATGGTGGGTGACCTT |
| 252 | E51SL10 | GTCACCAGAGTAACAGTCTGAG | 255 | E51SL17 | ATAAAATCACAGAGGGTGATGG |
| 252 | E51SL10 | GTCACCAGAGTAACAGTCTGAG | 256 | E51SL18 | TATAAAATCACAGAGGGTGATG |
| 252 | E51SL10 | GTCACCAGAGTAACAGTCTGAG | 257 | E51SL19 | AGTTATAAAATCACAGAGGGTG |
| 252 | E51SL10 | GTCACCAGAGTAACAGTCTGAG | 258 | E51SL20 | TGATCAAGTTATAAAATCACAG |
| 252 | E51SL10 | GTCACCAGAGTAACAGTCTGAG | 259 | E51SL21 | TTGATCAAGTTATAAAATCACA |
| 252 | E51SL10 | GTCACCAGAGTAACAGTCTGAG | 260 | E51SL22 | GGGCTTGGACAGAACTTACCGA |
| 252 | E51SL10 | GTCACCAGAGTAACAGTCTGAG | 261 | E51SL23 | CTCTGGCAGATTTCAACCGGGC |
| 252 | E51SL10 | GTCACCAGAGTAACAGTCTGAG | 262 | E51SL24 | ACCTGCTCTGGCAGATTTCAAC |
| 252 | E51SL10 | GTCACCAGAGTAACAGTCTGAG | 263 | E51SL25 | TACCTGCTCTGGCAGATTTCAA |
| 252 | E51SL10 | GTCACCAGAGTAACAGTCTGAG | 264 | E51SL26 | CTTGATGTTGGAGGTACCTGCT |
| 252 | E51SL10 | GTCACCAGAGTAACAGTCTGAG | 265 | E51SL27 | AATGCCATCTTCCTTGATGTTG |
| 252 | E51SL10 | GTCACCAGAGTAACAGTCTGAG | 266 | E51SL28 | AGAAATGCCATCTTCCTTGATG |
| 252 | E51SL10 | GTCACCAGAGTAACAGTCTGAG | 267 | E51SL29 | GGTGACACAACCTGTGGTTACT |
| 252 | E51SL10 | GTCACCAGAGTAACAGTCTGAG | 268 | E51SL30 | TGTTACTCTGGTGACACAACCT |
| 252 | E51SL10 | GTCACCAGAGTAACAGTCTGAG | 269 | E51SL31 | AGCTCCTACTCAGACTGTTACT |
| 253 | E51SL15 | CAACGAGATGATCATCAAGCAG | 254 | E51SL16 | GAGGGTGATGGTGGGTGACCTT |
| 253 | E51SL15 | CAACGAGATGATCATCAAGCAG | 255 | E51SL17 | ATAAAATCACAGAGGGTGATGG |
| 253 | E51SL15 | CAACGAGATGATCATCAAGCAG | 256 | E51SL18 | TATAAAATCACAGAGGGTGATG |
| 253 | E51SL15 | CAACGAGATGATCATCAAGCAG | 257 | E51SL19 | AGTTATAAAATCACAGAGGGTG |
| 253 | E51SL15 | CAACGAGATGATCATCAAGCAG | 258 | E51SL20 | TGATCAAGTTATAAAATCACAG |
| 253 | E51SL15 | CAACGAGATGATCATCAAGCAG | 259 | E51SL21 | TTGATCAAGTTATAAAATCACA |
| 253 | E51SL15 | CAACGAGATGATCATCAAGCAG | 260 | E51SL22 | GGGCTTGGACAGAACTTACCGA |
| 253 | E51SL15 | CAACGAGATGATCATCAAGCAG | 261 | E51SL23 | CTCTGGCAGATTTCAACCGGGC |
| 253 | E51SL15 | CAACGAGATGATCATCAAGCAG | 262 | E51SL24 | ACCTGCTCTGGCAGATTTCAAC |
| 253 | E51SL15 | CAACGAGATGATCATCAAGCAG | 263 | E51SL25 | TACCTGCTCTGGCAGATTTCAA |
| 253 | E51SL15 | CAACGAGATGATCATCAAGCAG | 264 | E51SL26 | CTTGATGTTGGAGGTACCTGCT |
| 253 | E51SL15 | CAACGAGATGATCATCAAGCAG | 265 | E51SL27 | AATGCCATCTTCCTTGATGTTG |
| 253 | E51SL15 | CAACGAGATGATCATCAAGCAG | 266 | E51SL28 | AGAAATGCCATCTTCCTTGATG |
| 253 | E51SL15 | CAACGAGATGATCATCAAGCAG | 267 | E51SL29 | GGTGACACAACCTGTGGTTACT |
| 253 | E51SL15 | CAACGAGATGATCATCAAGCAG | 268 | E51SL30 | TGTTACTCTGGTGACACAACCT |
| 253 | E51SL15 | CAACGAGATGATCATCAAGCAG | 269 | E51SL31 | AGCTCCTACTCAGACTGTTACT |
| 254 | E51SL16 | GAGGGTGATGGTGGGTGACCTT | 255 | E51SL17 | ATAAAATCACAGAGGGTGATGG |
| 254 | E51SL16 | GAGGGTGATGGTGGGTGACCTT | 256 | E51SL18 | TATAAAATCACAGAGGGTGATG |
| 254 | E51SL16 | GAGGGTGATGGTGGGTGACCTT | 257 | E51SL19 | AGTTATAAAATCACAGAGGGTG |
| 254 | E51SL16 | GAGGGTGATGGTGGGTGACCTT | 258 | E51SL20 | TGATCAAGTTATAAAATCACAG |
| 254 | E51SL16 | GAGGGTGATGGTGGGTGACCTT | 259 | E51SL21 | TTGATCAAGTTATAAAATCACA |
| 254 | E51SL16 | GAGGGTGATGGTGGGTGACCTT | 260 | E51SL22 | GGGCTTGGACAGAACTTACCGA |
| 254 | E51SL16 | GAGGGTGATGGTGGGTGACCTT | 261 | E51SL23 | CTCTGGCAGATTTCAACCGGGC |
| 254 | E51SL16 | GAGGGTGATGGTGGGTGACCTT | 262 | E51SL24 | ACCTGCTCTGGCAGATTTCAAC |
| 254 | E51SL16 | GAGGGTGATGGTGGGTGACCTT | 263 | E51SL25 | TACCTGCTCTGGCAGATTTCAA |
| 254 | E51SL16 | GAGGGTGATGGTGGGTGACCTT | 264 | E51SL26 | CTTGATGTTGGAGGTACCTGCT |
| 254 | E51SL16 | GAGGGTGATGGTGGGTGACCTT | 265 | E51SL27 | AATGCCATCTTCCTTGATGTTG |
| 254 | E51SL16 | GAGGGTGATGGTGGGTGACCTT | 266 | E51SL28 | AGAAATGCCATCTTCCTTGATG |
| 254 | E51SL16 | GAGGGTGATGGTGGGTGACCTT | 267 | E51SL29 | GGTGACACAACCTGTGGTTACT |
| 254 | E51SL16 | GAGGGTGATGGTGGGTGACCTT | 268 | E51SL30 | TGTTACTCTGGTGACACAACCT |
| 254 | E51SL16 | GAGGGTGATGGTGGGTGACCTT | 269 | E51SL31 | AGCTCCTACTCAGACTGTTACT |
| 255 | E51SL17 | ATAAAATCACAGAGGGTGATGG | 256 | E51SL18 | TATAAAATCACAGAGGGTGATG |
| 255 | E51SL17 | ATAAAATCACAGAGGGTGATGG | 257 | E51SL19 | AGTTATAAAATCACAGAGGGTG |
| 255 | E51SL17 | ATAAAATCACAGAGGGTGATGG | 258 | E51SL20 | TGATCAAGTTATAAAATCACAG |
| 255 | E51SL17 | ATAAAATCACAGAGGGTGATGG | 259 | E51SL21 | TTGATCAAGTTATAAAATCACA |
| 255 | E51SL17 | ATAAAATCACAGAGGGTGATGG | 260 | E51SL22 | GGGCTTGGACAGAACTTACCGA |
| 255 | E51SL17 | ATAAAATCACAGAGGGTGATGG | 261 | E51SL23 | CTCTGGCAGATTTCAACCGGGC |
| 255 | E51SL17 | ATAAAATCACAGAGGGTGATGG | 262 | E51SL24 | ACCTGCTCTGGCAGATTTCAAC |
| 255 | E51SL17 | ATAAAATCACAGAGGGTGATGG | 263 | E51SL25 | TACCTGCTCTGGCAGATTTCAA |
| 255 | E51SL17 | ATAAAATCACAGAGGGTGATGG | 264 | E51SL26 | CTTGATGTTGGAGGTACCTGCT |
| 255 | E51SL17 | ATAAAATCACAGAGGGTGATGG | 265 | E51SL27 | AATGCCATCTTCCTTGATGTTG |
| 255 | E51SL17 | ATAAAATCACAGAGGGTGATGG | 266 | E51SL28 | AGAAATGCCATCTTCCTTGATG |
| 255 | E51SL17 | ATAAAATCACAGAGGGTGATGG | 267 | E51SL29 | GGTGACACAACCTGTGGTTACT |
| 255 | E51SL17 | ATAAAATCACAGAGGGTGATGG | 268 | E51SL30 | TGTTACTCTGGTGACACAACCT |
| 255 | E51SL17 | ATAAAATCACAGAGGGTGATGG | 269 | E51SL31 | AGCTCCTACTCAGACTGTTACT |
| 256 | E51SL18 | TATAAAATCACAGAGGGTGATG | 257 | E51SL19 | AGTTATAAAATCACAGAGGGTG |
| 256 | E51SL18 | TATAAAATCACAGAGGGTGATG | 258 | E51SL20 | TGATCAAGTTATAAAATCACAG |
| 256 | E51SL18 | TATAAAATCACAGAGGGTGATG | 259 | E51SL21 | TTGATCAAGTTATAAAATCACA |
| 256 | E51SL18 | TATAAAATCACAGAGGGTGATG | 260 | E51SL22 | GGGCTTGGACAGAACTTACCGA |
| 256 | E51SL18 | TATAAAATCACAGAGGGTGATG | 261 | E51SL23 | CTCTGGCAGATTTCAACCGGGC |
| 256 | E51SL18 | TATAAAATCACAGAGGGTGATG | 262 | E51SL24 | ACCTGCTCTGGCAGATTTCAAC |
| 256 | E51SL18 | TATAAAATCACAGAGGGTGATG | 263 | E51SL25 | TACCTGCTCTGGCAGATTTCAA |
| 256 | E51SL18 | TATAAAATCACAGAGGGTGATG | 264 | E51SL26 | CTTGATGTTGGAGGTACCTGCT |
| 256 | E51SL18 | TATAAAATCACAGAGGGTGATG | 265 | E51SL27 | AATGCCATCTTCCTTGATGTTG |
| 256 | E51SL18 | TATAAAATCACAGAGGGTGATG | 266 | E51SL28 | AGAAATGCCATCTTCCTTGATG |
| 256 | E51SL18 | TATAAAATCACAGAGGGTGATG | 267 | E51SL29 | GGTGACACAACCTGTGGTTACT |
| 256 | E51SL18 | TATAAAATCACAGAGGGTGATG | 268 | E51SL30 | TGTTACTCTGGTGACACAACCT |
| 256 | E51SL18 | TATAAAATCACAGAGGGTGATG | 269 | E51SL31 | AGCTCCTACTCAGACTGTTACT |
| 257 | E51SL19 | AGTTATAAAATCACAGAGGGTG | 258 | E51SL20 | TGATCAAGTTATAAAATCACAG |
| 257 | E51SL19 | AGTTATAAAATCACAGAGGGTG | 259 | E51SL21 | TTGATCAAGTTATAAAATCACA |
| 257 | E51SL19 | AGTTATAAAATCACAGAGGGTG | 260 | E51SL22 | GGGCTTGGACAGAACTTACCGA |
| 257 | E51SL19 | AGTTATAAAATCACAGAGGGTG | 261 | E51SL23 | CTCTGGCAGATTTCAACCGGGC |
| 257 | E51SL19 | AGTTATAAAATCACAGAGGGTG | 262 | E51SL24 | ACCTGCTCTGGCAGATTTCAAC |
| 257 | E51SL19 | AGTTATAAAATCACAGAGGGTG | 263 | E51SL25 | TACCTGCTCTGGCAGATTTCAA |
| 257 | E51SL19 | AGTTATAAAATCACAGAGGGTG | 264 | E51SL26 | CTTGATGTTGGAGGTACCTGCT |
| 257 | E51SL19 | AGTTATAAAATCACAGAGGGTG | 265 | E51SL27 | AATGCCATCTTCCTTGATGTTG |
| 257 | E51SL19 | AGTTATAAAATCACAGAGGGTG | 266 | E51SL28 | AGAAATGCCATCTTCCTTGATG |
| 257 | E51SL19 | AGTTATAAAATCACAGAGGGTG | 267 | E51SL29 | GGTGACACAACCTGTGGTTACT |
| 257 | E51SL19 | AGTTATAAAATCACAGAGGGTG | 268 | E51SL30 | TGTTACTCTGGTGACACAACCT |
| 257 | E51SL19 | AGTTATAAAATCACAGAGGGTG | 269 | E51SL31 | AGCTCCTACTCAGACTGTTACT |
| 258 | E51SL20 | TGATCAAGTTATAAAATCACAG | 259 | E51SL21 | TTGATCAAGTTATAAAATCACA |
| 258 | E51SL20 | TGATCAAGTTATAAAATCACAG | 260 | E51SL22 | GGGCTTGGACAGAACTTACCGA |
| 258 | E51SL20 | TGATCAAGTTATAAAATCACAG | 261 | E51SL23 | CTCTGGCAGATTTCAACCGGGC |
| 258 | E51SL20 | TGATCAAGTTATAAAATCACAG | 262 | E51SL24 | ACCTGCTCTGGCAGATTTCAAC |
| 258 | E51SL20 | TGATCAAGTTATAAAATCACAG | 263 | E51SL25 | TACCTGCTCTGGCAGATTTCAA |
| 258 | E51SL20 | TGATCAAGTTATAAAATCACAG | 264 | E51SL26 | CTTGATGTTGGAGGTACCTGCT |
| 258 | E51SL20 | TGATCAAGTTATAAAATCACAG | 265 | E51SL27 | AATGCCATCTTCCTTGATGTTG |
| 258 | E51SL20 | TGATCAAGTTATAAAATCACAG | 266 | E51SL28 | AGAAATGCCATCTTCCTTGATG |
| 258 | E51SL20 | TGATCAAGTTATAAAATCACAG | 267 | E51SL29 | GGTGACACAACCTGTGGTTACT |
| 258 | E51SL20 | TGATCAAGTTATAAAATCACAG | 268 | E51SL30 | TGTTACTCTGGTGACACAACCT |
| 258 | E51SL20 | TGATCAAGTTATAAAATCACAG | 269 | E51SL31 | AGCTCCTACTCAGACTGTTACT |
| 259 | E51SL21 | TTGATCAAGTTATAAAATCACA | 260 | E51SL22 | GGGCTTGGACAGAACTTACCGA |
| 259 | E51SL21 | TTGATCAAGTTATAAAATCACA | 261 | E51SL23 | CTCTGGCAGATTTCAACCGGGC |
| 259 | E51SL21 | TTGATCAAGTTATAAAATCACA | 262 | E51SL24 | ACCTGCTCTGGCAGATTTCAAC |
| 259 | E51SL21 | TTGATCAAGTTATAAAATCACA | 263 | E51SL25 | TACCTGCTCTGGCAGATTTCAA |
| 259 | E51SL21 | TTGATCAAGTTATAAAATCACA | 264 | E51SL26 | CTTGATGTTGGAGGTACCTGCT |
| 259 | E51SL21 | TTGATCAAGTTATAAAATCACA | 265 | E51SL27 | AATGCCATCTTCCTTGATGTTG |
| 259 | E51SL21 | TTGATCAAGTTATAAAATCACA | 266 | E51SL28 | AGAAATGCCATCTTCCTTGATG |
| 259 | E51SL21 | TTGATCAAGTTATAAAATCACA | 267 | E51SL29 | GGTGACACAACCTGTGGTTACT |
| 259 | E51SL21 | TTGATCAAGTTATAAAATCACA | 268 | E51SL30 | TGTTACTCTGGTGACACAACCT |
| 259 | E51SL21 | TTGATCAAGTTATAAAATCACA | 269 | E51SL31 | AGCTCCTACTCAGACTGTTACT |
| 260 | E51SL22 | GGGCTTGGACAGAACTTACCGA | 261 | E51SL23 | CTCTGGCAGATTTCAACCGGGC |
| 260 | E51SL22 | GGGCTTGGACAGAACTTACCGA | 262 | E51SL24 | ACCTGCTCTGGCAGATTTCAAC |
| 260 | E51SL22 | GGGCTTGGACAGAACTTACCGA | 263 | E51SL25 | TACCTGCTCTGGCAGATTTCAA |
| 260 | E51SL22 | GGGCTTGGACAGAACTTACCGA | 264 | E51SL26 | CTTGATGTTGGAGGTACCTGCT |
| 260 | E51SL22 | GGGCTTGGACAGAACTTACCGA | 265 | E51SL27 | AATGCCATCTTCCTTGATGTTG |
| 260 | E51SL22 | GGGCTTGGACAGAACTTACCGA | 266 | E51SL28 | AGAAATGCCATCTTCCTTGATG |
| 260 | E51SL22 | GGGCTTGGACAGAACTTACCGA | 267 | E51SL29 | GGTGACACAACCTGTGGTTACT |
| 260 | E51SL22 | GGGCTTGGACAGAACTTACCGA | 268 | E51SL30 | TGTTACTCTGGTGACACAACCT |
| 260 | E51SL22 | GGGCTTGGACAGAACTTACCGA | 269 | E51SL31 | AGCTCCTACTCAGACTGTTACT |
| 261 | E51SL23 | CTCTGGCAGATTTCAACCGGGC | 262 | E51SL24 | ACCTGCTCTGGCAGATTTCAAC |
| 261 | E51SL23 | CTCTGGCAGATTTCAACCGGGC | 263 | E51SL25 | TACCTGCTCTGGCAGATTTCAA |
| 261 | E51SL23 | CTCTGGCAGATTTCAACCGGGC | 264 | E51SL26 | CTTGATGTTGGAGGTACCTGCT |
| 261 | E51SL23 | CTCTGGCAGATTTCAACCGGGC | 265 | E51SL27 | AATGCCATCTTCCTTGATGTTG |
| 261 | E51SL23 | CTCTGGCAGATTTCAACCGGGC | 266 | E51SL28 | AGAAATGCCATCTTCCTTGATG |
| 261 | E51SL23 | CTCTGGCAGATTTCAACCGGGC | 267 | E51SL29 | GGTGACACAACCTGTGGTTACT |
| 261 | E51SL23 | CTCTGGCAGATTTCAACCGGGC | 268 | E51SL30 | TGTTACTCTGGTGACACAACCT |
| 261 | E51SL23 | CTCTGGCAGATTTCAACCGGGC | 269 | E51SL31 | AGCTCCTACTCAGACTGTTACT |
| 262 | E51SL24 | ACCTGCTCTGGCAGATTTCAAC | 263 | E51SL25 | TACCTGCTCTGGCAGATTTCAA |
| 262 | E51SL24 | ACCTGCTCTGGCAGATTTCAAC | 264 | E51SL26 | CTTGATGTTGGAGGTACCTGCT |
| 262 | E51SL24 | ACCTGCTCTGGCAGATTTCAAC | 265 | E51SL27 | AATGCCATCTTCCTTGATGTTG |
| 262 | E51SL24 | ACCTGCTCTGGCAGATTTCAAC | 266 | E51SL28 | AGAAATGCCATCTTCCTTGATG |
| 262 | E51SL24 | ACCTGCTCTGGCAGATTTCAAC | 267 | E51SL29 | GGTGACACAACCTGTGGTTACT |
| 262 | E51SL24 | ACCTGCTCTGGCAGATTTCAAC | 268 | E51SL30 | TGTTACTCTGGTGACACAACCT |
| 262 | E51SL24 | ACCTGCTCTGGCAGATTTCAAC | 269 | E51SL31 | AGCTCCTACTCAGACTGTTACT |
| 263 | E51SL25 | TACCTGCTCTGGCAGATTTCAA | 264 | E51SL26 | CTTGATGTTGGAGGTACCTGCT |
| 263 | E51SL25 | TACCTGCTCTGGCAGATTTCAA | 265 | E51SL27 | AATGCCATCTTCCTTGATGTTG |
| 263 | E51SL25 | TACCTGCTCTGGCAGATTTCAA | 266 | E51SL28 | AGAAATGCCATCTTCCTTGATG |
| 263 | E51SL25 | TACCTGCTCTGGCAGATTTCAA | 267 | E51SL29 | GGTGACACAACCTGTGGTTACT |
| 263 | E51SL25 | TACCTGCTCTGGCAGATTTCAA | 268 | E51SL30 | TGTTACTCTGGTGACACAACCT |
| 263 | E51SL25 | TACCTGCTCTGGCAGATTTCAA | 269 | E51SL31 | AGCTCCTACTCAGACTGTTACT |
| 264 | E51SL26 | CTTGATGTTGGAGGTACCTGCT | 265 | E51SL27 | AATGCCATCTTCCTTGATGTTG |
| 264 | E51SL26 | CTTGATGTTGGAGGTACCTGCT | 266 | E51SL28 | AGAAATGCCATCTTCCTTGATG |
| 264 | E51SL26 | CTTGATGTTGGAGGTACCTGCT | 267 | E51SL29 | GGTGACACAACCTGTGGTTACT |
| 264 | E51SL26 | CTTGATGTTGGAGGTACCTGCT | 268 | E51SL30 | TGTTACTCTGGTGACACAACCT |
| 264 | E51SL26 | CTTGATGTTGGAGGTACCTGCT | 269 | E51SL31 | AGCTCCTACTCAGACTGTTACT |
| 265 | E51SL27 | AATGCCATCTTCCTTGATGTTG | 266 | E51SL28 | AGAAATGCCATCTTCCTTGATG |
| 265 | E51SL27 | AATGCCATCTTCCTTGATGTTG | 267 | E51SL29 | GGTGACACAACCTGTGGTTACT |
| 265 | E51SL27 | AATGCCATCTTCCTTGATGTTG | 268 | E51SL30 | TGTTACTCTGGTGACACAACCT |
| 265 | E51SL27 | AATGCCATCTTCCTTGATGTTG | 269 | E51SL31 | AGCTCCTACTCAGACTGTTACT |
| 266 | E51SL28 | AGAAATGCCATCTTCCTTGATG | 267 | E51SL29 | GGTGACACAACCTGTGGTTACT |
| 266 | E51SL28 | AGAAATGCCATCTTCCTTGATG | 268 | E51SL30 | TGTTACTCTGGTGACACAACCT |
| 266 | E51SL28 | AGAAATGCCATCTTCCTTGATG | 269 | E51SL31 | AGCTCCTACTCAGACTGTTACT |
| 267 | E51SL29 | GGTGACACAACCTGTGGTTACT | 268 | E51SL30 | TGTTACTCTGGTGACACAACCT |
| 267 | E51SL29 | GGTGACACAACCTGTGGTTACT | 269 | E51SL31 | AGCTCCTACTCAGACTGTTACT |
| 268 | E51SL30 | TGTTACTCTGGTGACACAACCT | 269 | E51SL31 | AGCTCCTACTCAGACTGTTACT |

### e) Exon 53:

TABLE 5A
(1). Exon 53 SaCas9 guides:

| Seq | Guide ID or | |
|---|---|---|
| ID No. | Guide RNA Name | Guide Sequence |
| 16 | E53Sa1 | CCTTGGTTTCTGTGATTTTCTT |
| 17 | E53Sa2 | TCCTTAGCTTCCAGCCATTGTG |
| 18 | E53Sa3 | CTTGTACTTCATCCCACTGATT |
| 19 | E53Sa4 | ACTGATTCTGAATTCTTTCAAC |
| 20 | E53Sa5 | AGCCAAGCTTGAGTCATGGAAG |
| 21 | E53Sa6 | TTAGGACAGGCCAGAGCCAAGC |
| 22 | E53Sa7 | GCAACAGTTGAATGAAATGTTA |
| 23 | E53Sa8 | CCTTCAGAACCGGAGGCAACAG |
| 24 | E53Sa9 | AGTTGAAAGAATTCAGAATCAG |
| 25 | E53Sa10 | TTTTATTCTAGTTGAAAGAATT |
| 26 | E53Sa11 | TTTTTCCTTTTATTCTAGTTGA |
| 70 | E53SaCas9KKH1 | AAAAGGTATCTTTGATACTAAC |
| 71 | E53SaCas9KKH2 | CTTTGATACTAACCTTGGTTTC |
| 72 | E53SaCas9KKH3 | CCTTGGTTTCTGTGATTTTCTT |
| 73 | E53SaCas9KKH4 | TCCTTAGCTTCCAGCCATTGTG |
| 74 | E53SaCas9KKH5 | AACATTTCATTCAACTGTTGCC |
| 75 | E53SaCas9KKH6 | TTCAACTGTTGCCTCCGGTTCT |
| 76 | E53SaCas9KKH7 | AGGTGTTCTTGTACTTCATCCC |
| 77 | E53SaCas9KKH8 | CTTGTACTTCATCCCACTGATT |
| 78 | E53SaCas9KKH9 | ACTGATTCTGAATTCTTTCAAC |
| 79 | E53SaCas9KKH10 | TTCTTTCAACTAGAATAAAAGG |
| 80 | E53SaCas9KKH11 | TTCAACTAGAATAAAAGGAAAA |
| 81 | E53SaCas9KKH12 | AGAATAAAAGGAAAAATAAATA |
| 82 | E53SaCas9KKH13 | GTTAGTATCAAAGATACCTTTT |
| 83 | E53SaCas9KKH14 | CACAGAAACCAAGGTTAGTATC |
| 84 | E53SaCas9KKH15 | AAAGAAAATCACAGAAACCAAG |
| 85 | E53SaCas9KKH16 | TCCAAAAGAAAATCACAGAAAC |
| 86 | E53SaCas9KKH17 | ATACAGTAGATGCAATCCAAAA |
| 87 | E53SaCas9KKH18 | AGGAGGGTCCCTATACAGTAGA |
| 88 | E53SaCas9KKH19 | ATGGAAGGAGGGTCCCTATACA |
| 89 | E53SaCas9KKH20 | AGTCATGGAAGGAGGGTCCCTA |
| 90 | E53SaCas9KKH21 | AGCCAAGCTTGAGTCATGGAAG |
| 91 | E53SaCas9KKH22 | TTAGGACAGGCCAGAGCCAAGC |
| 92 | E53SaCas9KKH23 | TGGAAGCTAAGGAAGAAGCTGA |
| 93 | E53SaCas9KKH24 | AATGAAATGTTAAAGGATTCAA |
| 94 | E53SaCas9KKH25 | GCAACAGTTGAATGAAATGTTA |
| 95 | E53SaCas9KKH26 | AGAACCGGAGGCAACAGTTGAA |
| 96 | E53SaCas9KKH27 | CCTTCAGAACCGGAGGCAACAG |
| 97 | E53SaCas9KKH28 | GAACACCTTCAGAACCGGAGGC |
| 98 | E53SaCas9KKH29 | AAAGAATTCAGAATCAGTGGGA |
| 99 | E53SaCas9KKH30 | AGTTGAAAGAATTCAGAATCAG |
| 100 | E53SaCas9KKH31 | ATTCTAGTTGAAAGAATTCAGA |
| 101 | E53SaCas9KKH32 | TTTTATTCTAGTTGAAAGAATT |
| 102 | E53SaCas9KKH33 | TTTTTCCTTTTATTCTAGTTGA |
| 103 | E53SaCas9KKH34 | ATATATTTATTTTTCCTTTTAT |

TABLE 5B
(2). Exon 53 SaCas9 pairs:

| Guide 1 | | | Guide 2 | | |
|---|---|---|---|---|---|
| Seq ID | | | Seq ID | | |
| No. | Guide 1 | Guide 1 Sequence | No. | Guide 2 | Guide 2 Sequence |
| 16 | E53Sa1 | CCTTGGTTTCTGTGATTTT | 17 | E53Sa2 | TCCTTAGCTTCCAGCCATT |
| | | CTT | | | GTG |
| 16 | E53Sa1 | CCTTGGTTTCTGTGATTTT | 18 | E53Sa3 | CTTGTACTTCATCCCACTG |
| | | CTT | | | ATT |
| 16 | E53Sa1 | CCTTGGTTTCTGTGATTTT | 19 | E53Sa4 | ACTGATTCTGAATTCTTTC |
| | | CTT | | | AAC |
| 16 | E53Sa1 | CCTTGGTTTCTGTGATTTT | 20 | E53Sa5 | AGCCAAGCTTGAGTCATGG |
| | | CTT | | | AAG |
| 16 | E53Sa1 | CCTTGGTTTCTGTGATTTT | 21 | E53Sa6 | TTAGGACAGGCCAGAGCCA |
| | | CTT | | | AGC |
| 16 | E53Sa1 | CCTTGGTTTCTGTGATTTT | 22 | E53Sa7 | GCAACAGTTGAATGAAATG |
| | | CTT | | | TTA |
| 16 | E53Sa1 | CCTTGGTTTCTGTGATTTT | 23 | E53Sa8 | CCTTCAGAACCGGAGGCAA |
| | | CTT | | | CAG |
| 16 | E53Sa1 | CCTTGGTTTCTGTGATTTT | 24 | E53Sa9 | AGTTGAAAGAATTCAGAAT |
| | | CTT | | | CAG |
| 16 | E53Sa1 | CCTTGGTTTCTGTGATTTT | 25 | E53Sa10 | TTTTATTCTAGTTGAAAGA |
| | | CTT | | | ATT |
| 16 | E53Sa1 | CCTTGGTTTCTGTGATTTT | 26 | E53Sa11 | TTTTTCCTTTTATTCTAGT |
| | | CTT | | | TGA |
| 17 | E53Sa2 | TCCTTAGCTTCCAGCCATT | 18 | E53Sa3 | CTTGTACTTCATCCCACTG |
| | | GTG | | | ATT |
| 17 | E53Sa2 | TCCTTAGCTTCCAGCCATT | 19 | E53Sa4 | ACTGATTCTGAATTCTTTC |
| | | GTG | | | AAC |
| 17 | E53Sa2 | TCCTTAGCTTCCAGCCATT | 20 | E53Sa5 | AGCCAAGCTTGAGTCATGG |
| | | GTG | | | AAG |
| 17 | E53Sa2 | TCCTTAGCTTCCAGCCATT | 21 | E53Sa6 | TTAGGACAGGCCAGAGCCA |
| | | GTG | | | AGC |
| 17 | E53Sa2 | TCCTTAGCTTCCAGCCATT | 22 | E53Sa7 | GCAACAGTTGAATGAAATG |
| | | GTG | | | TTA |
| 17 | E53Sa2 | TCCTTAGCTTCCAGCCATT | 23 | E53Sa8 | CCTTCAGAACCGGAGGCAA |
| | | GTG | | | CAG |
| 17 | E53Sa2 | TCCTTAGCTTCCAGCCATT | 24 | E53Sa9 | AGTTGAAAGAATTCAGAAT |
| | | GTG | | | CAG |
| 17 | E53Sa2 | TCCTTAGCTTCCAGCCATT | 25 | E53Sa10 | TTTTATTCTAGTTGAAAGA |
| | | GTG | | | ATT |
| 17 | E53Sa2 | TCCTTAGCTTCCAGCCATT | 26 | E53Sa11 | TTTTTCCTTTTATTCTAGT |
| | | GTG | | | TGA |
| 18 | E53Sa3 | CTTGTACTTCATCCCACTG | 19 | E53Sa4 | ACTGATTCTGAATTCTTTC |
| | | ATT | | | AAC |
| 18 | E53Sa3 | CTTGTACTTCATCCCACTG | 20 | E53Sa5 | AGCCAAGCTTGAGTCATGG |
| | | ATT | | | AAG |
| 18 | E53Sa3 | CTTGTACTTCATCCCACTG | 21 | E53Sa6 | TTAGGACAGGCCAGAGCCA |
| | | ATT | | | AGC |
| 18 | E53Sa3 | CTTGTACTTCATCCCACTG | 22 | E53Sa7 | GCAACAGTTGAATGAAATG |
| | | ATT | | | TTA |
| 18 | E53Sa3 | CTTGTACTTCATCCCACTG | 23 | E53Sa8 | CCTTCAGAACCGGAGGCAA |
| | | ATT | | | CAG |
| 18 | E53Sa3 | CTTGTACTTCATCCCACTG | 24 | E53Sa9 | AGTTGAAAGAATTCAGAAT |
| | | ATT | | | CAG |
| 18 | E53Sa3 | CTTGTACTTCATCCCACTG | 25 | E53Sa10 | TTTTATTCTAGTTGAAAGA |
| | | ATT | | | ATT |
| 18 | E53Sa3 | CTTGTACTTCATCCCACTG | 26 | E53Sa11 | TTTTTCCTTTTATTCTAGT |
| | | ATT | | | TGA |
| 19 | E53Sa4 | ACTGATTCTGAATTCTTTC | 20 | E53Sa5 | AGCCAAGCTTGAGTCATGG |
| | | AAC | | | AAG |
| 19 | E53Sa4 | ACTGATTCTGAATTCTTTC | 21 | E53Sa6 | TTAGGACAGGCCAGAGCCA |
| | | AAC | | | AGC |
| 19 | E53Sa4 | ACTGATTCTGAATTCTTTC | 22 | E53Sa7 | GCAACAGTTGAATGAAATG |
| | | AAC | | | TTA |
| 19 | E53Sa4 | ACTGATTCTGAATTCTTTC | 23 | E53Sa8 | CCTTCAGAACCGGAGGCAA |
| | | AAC | | | CAG |
| 19 | E53Sa4 | ACTGATTCTGAATTCTTTC | 24 | E53Sa9 | AGTTGAAAGAATTCAGAAT |
| | | AAC | | | CAG |
| 19 | E53Sa4 | ACTGATTCTGAATTCTTTC | 25 | E53Sa10 | TTTTATTCTAGTTGAAAGA |
| | | AAC | | | ATT |
| 19 | E53Sa4 | ACTGATTCTGAATTCTTTC | 26 | E53Sa11 | TTTTTCCTTTTATTCTAGT |
| | | AAC | | | TGA |
| 20 | E53Sa5 | AGCCAAGCTTGAGTCATGG | 21 | E53Sa6 | TTAGGACAGGCCAGAGCCA |
| | | AAG | | | AGC |
| 20 | E53Sa5 | AGCCAAGCTTGAGTCATGG | 22 | E53Sa7 | GCAACAGTTGAATGAAATG |
| | | AAG | | | TTA |
| 20 | E53Sa5 | AGCCAAGCTTGAGTCATGG | 23 | E53Sa8 | CCTTCAGAACCGGAGGCAA |
| | | AAG | | | CAG |
| 20 | E53Sa5 | AGCCAAGCTTGAGTCATGG | 24 | E53Sa9 | AGTTGAAAGAATTCAGAAT |
| | | AAG | | | CAG |
| 20 | E53Sa5 | AGCCAAGCTTGAGTCATGG | 25 | E53Sa10 | TTTTATTCTAGTTGAAAGA |
| | | AAG | | | ATT |
| 20 | E53Sa5 | AGCCAAGCTTGAGTCATGG | 26 | E53Sa11 | TTTTTCCTTTTATTCTAGT |
| | | AAG | | | TGA |
| 21 | E53Sa6 | TTAGGACAGGCCAGAGCCA | 22 | E53Sa7 | GCAACAGTTGAATGAAATG |
| | | AGC | | | TTA |
| 21 | E53Sa6 | TTAGGACAGGCCAGAGCCA | 23 | E53Sa8 | CCTTCAGAACCGGAGGCAA |
| | | AGC | | | CAG |
| 21 | E53Sa6 | TTAGGACAGGCCAGAGCCA | 24 | E53Sa9 | AGTTGAAAGAATTCAGAAT |
| | | AGC | | | CAG |
| 21 | E53Sa6 | TTAGGACAGGCCAGAGCCA | 25 | E53Sa10 | TTTTATTCTAGTTGAAAGA |
| | | AGC | | | ATT |
| 21 | E53Sa6 | TTAGGACAGGCCAGAGCCA | 26 | E53Sa11 | TTTTTCCTTTTATTCTAGT |
| | | AGC | | | TGA |
| 22 | E53Sa7 | GCAACAGTTGAATGAAATG | 23 | E53Sa8 | CCTTCAGAACCGGAGGCAA |
| | | TTA | | | CAG |
| 22 | E53Sa7 | GCAACAGTTGAATGAAATG | 24 | E53Sa9 | AGTTGAAAGAATTCAGAAT |
| | | TTA | | | CAG |
| 22 | E53Sa7 | GCAACAGTTGAATGAAATG | 25 | E53Sa10 | TTTTATTCTAGTTGAAAGA |
| | | TTA | | | ATT |
| 22 | E53Sa7 | GCAACAGTTGAATGAAATG | 26 | E53Sa11 | TTTTTCCTTTTATTCTAGT |
| | | TTA | | | TGA |
| 23 | E53Sa8 | CCTTCAGAACCGGAGGCAA | 24 | E53Sa9 | AGTTGAAAGAATTCAGAAT |
| | | CAG | | | CAG |
| 23 | E53Sa8 | CCTTCAGAACCGGAGGCAA | 25 | E53Sa10 | TTTTATTCTAGTTGAAAGA |
| | | CAG | | | ATT |
| 23 | E53Sa8 | CCTTCAGAACCGGAGGCAA | 26 | E53Sa11 | TTTTTCCTTTTATTCTAGT |
| | | CAG | | | TGA |
| 24 | E53Sa9 | AGTTGAAAGAATTCAGAAT | 25 | E53Sa10 | TTTTATTCTAGTTGAAAGA |
| | | CAG | | | ATT |
| 24 | E53Sa9 | AGTTGAAAGAATTCAGAAT | 26 | E53Sa11 | TTTTTCCTTTTATTCTAGT |
| | | CAG | | | TGA |
| 25 | E53Sa10 | TTTTATTCTAGTTGAAAGA | 26 | E53Sa11 | TTTTTCCTTTTATTCTAGT |
| | | ATT | | | TGA |
| 71 | E53SaCas9KKH2 | CTTTGATACTAACCTTGGT | 72 | E53SaCas9KKH3 | CCTTGGTTTCTGTGATTTT |
| | | TTC | | | CTT |
| 71 | E53SaCas9KKH2 | CTTTGATACTAACCTTGGT | 73 | E53SaCas9KKH4 | TCCTTAGCTTCCAGCCATT |
| | | TTC | | | GTG |
| 71 | E53SaCas9KKH2 | CTTTGATACTAACCTTGGT | 74 | E53SaCas9KKH5 | AACATTTCATTCAACTGTT |
| | | TTC | | | GCC |
| 71 | E53SaCas9KKH2 | CTTTGATACTAACCTTGGT | 75 | E53SaCas9KKH6 | TTCAACTGTTGCCTCCGGT |
| | | TTC | | | TCT |
| 71 | E53SaCas9KKH2 | CTTTGATACTAACCTTGGT | 76 | E53SaCas9KKH7 | AGGTGTTCTTGTACTTCAT |
| | | TTC | | | CCC |
| 71 | E53SaCas9KKH2 | CTTTGATACTAACCTTGGT | 77 | E53SaCas9KKH8 | CTTGTACTTCATCCCACTG |
| | | TTC | | | ATT |
| 71 | E53SaCas9KKH2 | CTTTGATACTAACCTTGGT | 78 | E53SaCas9KKH9 | ACTGATTCTGAATTCTTTC |
| | | TTC | | | AAC |
| 71 | E53SaCas9KKH2 | CTTTGATACTAACCTTGGT | 84 | E53SaCas9KKH15 | AAAGAAAATCACAGAAACC |
| | | TTC | | | AAG |
| 71 | E53SaCas9KKH2 | CTTTGATACTAACCTTGGT | 85 | E53SaCas9KKH16 | TCCAAAAGAAAATCACAGA |
| | | TTC | | | AAC |
| 71 | E53SaCas9KKH2 | CTTTGATACTAACCTTGGT | 86 | E53SaCas9KKH17 | ATACAGTAGATGCAATCCA |
| | | TTC | | | AAA |
| 71 | E53SaCas9KKH2 | CTTTGATACTAACCTTGGT | 87 | E53SaCas9KKH18 | AGGAGGGTCCCTATACAGT |
| | | TTC | | | AGA |
| 71 | E53SaCas9KKH2 | CTTTGATACTAACCTTGGT | 88 | E53SaCas9KKH19 | ATGGAAGGAGGGTCCCTAT |
| | | TTC | | | ACA |
| 71 | E53SaCas9KKH2 | CTTTGATACTAACCTTGGT | 89 | E53SaCas9KKH20 | AGTCATGGAAGGAGGGTCC |
| | | TTC | | | CTA |
| 71 | E53SaCas9KKH2 | CTTTGATACTAACCTTGGT | 90 | E53SaCas9KKH21 | AGCCAAGCTTGAGTCATGG |
| | | TTC | | | AAG |
| 71 | E53SaCas9KKH2 | CTTTGATACTAACCTTGGT | 91 | E53SaCas9KKH22 | TTAGGACAGGCCAGAGCCA |
| | | TTC | | | AGC |
| 71 | E53SaCas9KKH2 | CTTTGATACTAACCTTGGT | 92 | E53SaCas9KKH23 | TGGAAGCTAAGGAAGAAGC |
| | | TTC | | | TGA |
| 71 | E53SaCas9KKH2 | CTTTGATACTAACCTTGGT | 93 | E53SaCas9KKH24 | AATGAAATGTTAAAGGATT |
| | | TTC | | | CAA |
| 71 | E53SaCas9KKH2 | CTTTGATACTAACCTTGGT | 94 | E53SaCas9KKH25 | GCAACAGTTGAATGAAATG |
| | | TTC | | | TTA |
| 71 | E53SaCas9KKH2 | CTTTGATACTAACCTTGGT | 95 | E53SaCas9KKH26 | AGAACCGGAGGCAACAGTT |
| | | TTC | | | GAA |
| 71 | E53SaCas9KKH2 | CTTTGATACTAACCTTGGT | 96 | E53SaCas9KKH27 | CCTTCAGAACCGGAGGCAA |
| | | TTC | | | CAG |
| 71 | E53SaCas9KKH2 | CTTTGATACTAACCTTGGT | 97 | E53SaCas9KKH28 | GAACACCTTCAGAACCGGA |
| | | TTC | | | GGC |
| 71 | E53SaCas9KKH2 | CTTTGATACTAACCTTGGT | 98 | E53SaCas9KKH29 | AAAGAATTCAGAATCAGTG |
| | | TTC | | | GGA |
| 71 | E53SaCas9KKH2 | CTTTGATACTAACCTTGGT | 99 | E53SaCas9KKH30 | AGTTGAAAGAATTCAGAAT |
| | | TTC | | | CAG |
| 71 | E53SaCas9KKH2 | CTTTGATACTAACCTTGGT | 100 | E53SaCas9KKH31 | ATTCTAGTTGAAAGAATTC |
| | | TTC | | | AGA |
| 71 | E53SaCas9KKH2 | CTTTGATACTAACCTTGGT | 101 | E53SaCas9KKH32 | TTTTATTCTAGTTGAAAGA |
| | | TTC | | | ATT |
| 71 | E53SaCas9KKH2 | CTTTGATACTAACCTTGGT | 102 | E53SaCas9KKH33 | TTTTTCCTTTTATTCTAGT |
| | | TTC | | | TGA |
| 72 | E53SaCas9KKH3 | CCTTGGTTTCTGTGATTTT | 73 | E53SaCas9KKH4 | TCCTTAGCTTCCAGCCATT |
| | | CTT | | | GTG |
| 72 | E53SaCas9KKH3 | CCTTGGTTTCTGTGATTTT | 74 | E53SaCas9KKH5 | AACATTTCATTCAACTGTT |
| | | CTT | | | GCC |
| 72 | E53SaCas9KKH3 | CCTTGGTTTCTGTGATTTT | 75 | E53SaCas9KKH6 | TTCAACTGTTGCCTCCGGT |
| | | CTT | | | TCT |
| 72 | E53SaCas9KKH3 | CCTTGGTTTCTGTGATTTT | 76 | E53SaCas9KKH7 | AGGTGTTCTTGTACTTCAT |
| | | CTT | | | CCC |
| 72 | E53SaCas9KKH3 | CCTTGGTTTCTGTGATTTT | 77 | E53SaCas9KKH8 | CTTGTACTTCATCCCACTG |
| | | CTT | | | ATT |
| 72 | E53SaCas9KKH3 | CCTTGGTTTCTGTGATTTT | 78 | E53SaCas9KKH9 | ACTGATTCTGAATTCTTTC |
| | | CTT | | | AAC |
| 72 | E53SaCas9KKH3 | CCTTGGTTTCTGTGATTTT | 84 | E53SaCas9KKH15 | AAAGAAAATCACAGAAACC |
| | | CTT | | | AAG |
| 72 | E53SaCas9KKH3 | CCTTGGTTTCTGTGATTTT | 85 | E53SaCas9KKH16 | TCCAAAAGAAAATCACAGA |
| | | CTT | | | AAC |
| 72 | E53SaCas9KKH3 | CCTTGGTTTCTGTGATTTT | 86 | E53SaCas9KKH17 | ATACAGTAGATGCAATCCA |
| | | CTT | | | AAA |
| 72 | E53SaCas9KKH3 | CCTTGGTTTCTGTGATTTT | 87 | E53SaCas9KKH18 | AGGAGGGTCCCTATACAGT |
| | | CTT | | | AGA |
| 72 | E53SaCas9KKH3 | CCTTGGTTTCTGTGATTTT | 88 | E53SaCas9KKH19 | ATGGAAGGAGGGTCCCTAT |
| | | CTT | | | ACA |
| 72 | E53SaCas9KKH3 | CCTTGGTTTCTGTGATTTT | 89 | E53SaCas9KKH20 | AGTCATGGAAGGAGGGTCC |
| | | CTT | | | CTA |
| 72 | E53SaCas9KKH3 | CCTTGGTTTCTGTGATTTT | 90 | E53SaCas9KKH21 | AGCCAAGCTTGAGTCATGG |
| | | CTT | | | AAG |
| 72 | E53SaCas9KKH3 | CCTTGGTTTCTGTGATTTT | 91 | E53SaCas9KKH22 | TTAGGACAGGCCAGAGCCA |
| | | CTT | | | AGC |
| 72 | E53SaCas9KKH3 | CCTTGGTTTCTGTGATTTT | 92 | E53SaCas9KKH23 | TGGAAGCTAAGGAAGAAGC |
| | | CTT | | | TGA |
| 72 | E53SaCas9KKH3 | CCTTGGTTTCTGTGATTTT | 93 | E53SaCas9KKH24 | AATGAAATGTTAAAGGATT |
| | | CTT | | | CAA |
| 72 | E53SaCas9KKH3 | CCTTGGTTTCTGTGATTTT | 94 | E53SaCas9KKH25 | GCAACAGTTGAATGAAATG |
| | | CTT | | | TTA |
| 72 | E53SaCas9KKH3 | CCTTGGTTTCTGTGATTTT | 95 | E53SaCas9KKH26 | AGAACCGGAGGCAACAGTT |
| | | CTT | | | GAA |
| 72 | E53SaCas9KKH3 | CCTTGGTTTCTGTGATTTT | 96 | E53SaCas9KKH27 | CCTTCAGAACCGGAGGCAA |
| | | CTT | | | CAG |
| 72 | E53SaCas9KKH3 | CCTTGGTTTCTGTGATTTT | 97 | E53SaCas9KKH28 | GAACACCTTCAGAACCGGA |
| | | CTT | | | GGC |
| 72 | E53SaCas9KKH3 | CCTTGGTTTCTGTGATTTT | 98 | E53SaCas9KKH29 | AAAGAATTCAGAATCAGTG |
| | | CTT | | | GGA |
| 72 | E53SaCas9KKH3 | CCTTGGTTTCTGTGATTTT | 99 | E53SaCas9KKH30 | AGTTGAAAGAATTCAGAAT |
| | | CTT | | | CAG |
| 72 | E53SaCas9KKH3 | CCTTGGTTTCTGTGATTTT | 100 | E53SaCas9KKH31 | ATTCTAGTTGAAAGAATTC |
| | | CTT | | | AGA |
| 72 | E53SaCas9KKH3 | CCTTGGTTTCTGTGATTTT | 101 | E53SaCas9KKH32 | TTTTATTCTAGTTGAAAGA |
| | | CTT | | | ATT |
| 72 | E53SaCas9KKH3 | CCTTGGTTTCTGTGATTTT | 102 | E53SaCas9KKH33 | TTTTTCCTTTTATTCTAGT |
| | | CTT | | | TGA |
| 73 | E53SaCas9KKH4 | TCCTTAGCTTCCAGCCATT | 74 | E53SaCas9KKH5 | AACATTTCATTCAACTGTT |
| | | GTG | | | GCC |
| 73 | E53SaCas9KKH4 | TCCTTAGCTTCCAGCCATT | 75 | E53SaCas9KKH6 | TTCAACTGTTGCCTCCGGT |
| | | GTG | | | TCT |
| 73 | E53SaCas9KKH4 | TCCTTAGCTTCCAGCCATT | 76 | E53SaCas9KKH7 | AGGTGTTCTTGTACTTCAT |
| | | GTG | | | CCC |
| 73 | E53SaCas9KKH4 | TCCTTAGCTTCCAGCCATT | 77 | E53SaCas9KKH8 | CTTGTACTTCATCCCACTG |
| | | GTG | | | ATT |
| 73 | E53SaCas9KKH4 | TCCTTAGCTTCCAGCCATT | 78 | E53SaCas9KKH9 | ACTGATTCTGAATTCTTTC |
| | | GTG | | | AAC |
| 73 | E53SaCas9KKH4 | TCCTTAGCTTCCAGCCATT | 84 | E53SaCas9KKH15 | AAAGAAAATCACAGAAACC |
| | | GTG | | | AAG |
| 73 | E53SaCas9KKH4 | TCCTTAGCTTCCAGCCATT | 85 | E53SaCas9KKH16 | TCCAAAAGAAAATCACAGA |
| | | GTG | | | AAC |
| 73 | E53SaCas9KKH4 | TCCTTAGCTTCCAGCCATT | 86 | E53SaCas9KKH17 | ATACAGTAGATGCAATCCA |
| | | GTG | | | AAA |
| 73 | E53SaCas9KKH4 | TCCTTAGCTTCCAGCCATT | 87 | E53SaCas9KKH18 | AGGAGGGTCCCTATACAGT |
| | | GTG | | | AGA |
| 73 | E53SaCas9KKH4 | TCCTTAGCTTCCAGCCATT | 88 | E53SaCas9KKH19 | ATGGAAGGAGGGTCCCTAT |
| | | GTG | | | ACA |
| 73 | E53SaCas9KKH4 | TCCTTAGCTTCCAGCCATT | 89 | E53SaCas9KKH20 | AGTCATGGAAGGAGGGTCC |
| | | GTG | | | CTA |
| 73 | E53SaCas9KKH4 | TCCTTAGCTTCCAGCCATT | 90 | E53SaCas9KKH21 | AGCCAAGCTTGAGTCATGG |
| | | GTG | | | AAG |
| 73 | E53SaCas9KKH4 | TCCTTAGCTTCCAGCCATT | 91 | E53SaCas9KKH22 | TTAGGACAGGCCAGAGCCA |
| | | GTG | | | AGC |
| 73 | E53SaCas9KKH4 | TCCTTAGCTTCCAGCCATT | 92 | E53SaCas9KKH23 | TGGAAGCTAAGGAAGAAGC |
| | | GTG | | | TGA |
| 73 | E53SaCas9KKH4 | TCCTTAGCTTCCAGCCATT | 93 | E53SaCas9KKH24 | AATGAAATGTTAAAGGATT |
| | | GTG | | | CAA |
| 73 | E53SaCas9KKH4 | TCCTTAGCTTCCAGCCATT | 94 | E53SaCas9KKH25 | GCAACAGTTGAATGAAATG |
| | | GTG | | | TTA |
| 73 | E53SaCas9KKH4 | TCCTTAGCTTCCAGCCATT | 95 | E53SaCas9KKH26 | AGAACCGGAGGCAACAGTT |
| | | GTG | | | GAA |
| 73 | E53SaCas9KKH4 | TCCTTAGCTTCCAGCCATT | 96 | E53SaCas9KKH27 | CCTTCAGAACCGGAGGCAA |
| | | GTG | | | CAG |
| 73 | E53SaCas9KKH4 | TCCTTAGCTTCCAGCCATT | 97 | E53SaCas9KKH28 | GAACACCTTCAGAACCGGA |
| | | GTG | | | GGC |
| 73 | E53SaCas9KKH4 | TCCTTAGCTTCCAGCCATT | 98 | E53SaCas9KKH29 | AAAGAATTCAGAATCAGTG |
| | | GTG | | | GGA |
| 73 | E53SaCas9KKH4 | TCCTTAGCTTCCAGCCATT | 99 | E53SaCas9KKH30 | AGTTGAAAGAATTCAGAAT |
| | | GTG | | | CAG |
| 73 | E53SaCas9KKH4 | TCCTTAGCTTCCAGCCATT | 100 | E53SaCas9KKH31 | ATTCTAGTTGAAAGAATTC |
| | | GTG | | | AGA |
| 73 | E53SaCas9KKH4 | TCCTTAGCTTCCAGCCATT | 101 | E53SaCas9KKH32 | TTTTATTCTAGTTGAAAGA |
| | | GTG | | | ATT |
| 73 | E53SaCas9KKH4 | TCCTTAGCTTCCAGCCATT | 102 | E53SaCas9KKH33 | TTTTTCCTTTTATTCTAGT |
| | | GTG | | | TGA |
| 74 | E53SaCas9KKH5 | AACATTTCATTCAACTGTT | 75 | E53SaCas9KKH6 | TTCAACTGTTGCCTCCGGT |
| | | GCC | | | TCT |
| 74 | E53SaCas9KKH5 | AACATTTCATTCAACTGTT | 76 | E53SaCas9KKH7 | AGGTGTTCTTGTACTTCAT |
| | | GCC | | | CCC |
| 74 | E53SaCas9KKH5 | AACATTTCATTCAACTGTT | 77 | E53SaCas9KKH8 | CTTGTACTTCATCCCACTG |
| | | GCC | | | ATT |
| 74 | E53SaCas9KKH5 | AACATTTCATTCAACTGTT | 78 | E53SaCas9KKH9 | ACTGATTCTGAATTCTTTC |
| | | GCC | | | AAC |
| 74 | E53SaCas9KKH5 | AACATTTCATTCAACTGTT | 84 | E53SaCas9KKH15 | AAAGAAAATCACAGAAACC |
| | | GCC | | | AAG |
| 74 | E53SaCas9KKH5 | AACATTTCATTCAACTGTT | 85 | E53SaCas9KKH16 | TCCAAAAGAAAATCACAGA |
| | | GCC | | | AAC |
| 74 | E53SaCas9KKH5 | AACATTTCATTCAACTGTT | 86 | E53SaCas9KKH17 | ATACAGTAGATGCAATCCA |
| | | GCC | | | AAA |
| 74 | E53SaCas9KKH5 | AACATTTCATTCAACTGTT | 87 | E53SaCas9KKH18 | AGGAGGGTCCCTATACAGT |
| | | GCC | | | AGA |
| 74 | E53SaCas9KKH5 | AACATTTCATTCAACTGTT | 88 | E53SaCas9KKH19 | ATGGAAGGAGGGTCCCTAT |
| | | GCC | | | ACA |
| 74 | E53SaCas9KKH5 | AACATTTCATTCAACTGTT | 89 | E53SaCas9KKH20 | AGTCATGGAAGGAGGGTCC |
| | | GCC | | | CTA |
| 74 | E53SaCas9KKH5 | AACATTTCATTCAACTGTT | 90 | E53SaCas9KKH21 | AGCCAAGCTTGAGTCATGG |
| | | GCC | | | AAG |
| 74 | E53SaCas9KKH5 | AACATTTCATTCAACTGTT | 91 | E53SaCas9KKH22 | TTAGGACAGGCCAGAGCCA |
| | | GCC | | | AGC |
| 74 | E53SaCas9KKH5 | AACATTTCATTCAACTGTT | 92 | E53SaCas9KKH23 | TGGAAGCTAAGGAAGAAGC |
| | | GCC | | | TGA |
| 74 | E53SaCas9KKH5 | AACATTTCATTCAACTGTT | 93 | E53SaCas9KKH24 | AATGAAATGTTAAAGGATT |
| | | GCC | | | CAA |
| 74 | E53SaCas9KKH5 | AACATTTCATTCAACTGTT | 94 | E53SaCas9KKH25 | GCAACAGTTGAATGAAATG |
| | | GCC | | | TTA |
| 74 | E53SaCas9KKH5 | AACATTTCATTCAACTGTT | 95 | E53SaCas9KKH26 | AGAACCGGAGGCAACAGTT |
| | | GCC | | | GAA |
| 74 | E53SaCas9KKH5 | AACATTTCATTCAACTGTT | 96 | E53SaCas9KKH27 | CCTTCAGAACCGGAGGCAA |
| | | GCC | | | CAG |
| 74 | E53SaCas9KKH5 | AACATTTCATTCAACTGTT | 97 | E53SaCas9KKH28 | GAACACCTTCAGAACCGGA |
| | | GCC | | | GGC |
| 74 | E53SaCas9KKH5 | AACATTTCATTCAACTGTT | 98 | E53SaCas9KKH29 | AAAGAATTCAGAATCAGTG |
| | | GCC | | | GGA |
| 74 | E53SaCas9KKH5 | AACATTTCATTCAACTGTT | 99 | E53SaCas9KKH30 | AGTTGAAAGAATTCAGAAT |
| | | GCC | | | CAG |
| 74 | E53SaCas9KKH5 | AACATTTCATTCAACTGTT | 100 | E53SaCas9KKH31 | ATTCTAGTTGAAAGAATTC |
| | | GCC | | | AGA |
| 74 | E53SaCas9KKH5 | AACATTTCATTCAACTGTT | 101 | E53SaCas9KKH32 | TTTTATTCTAGTTGAAAGA |
| | | GCC | | | ATT |
| 74 | E53SaCas9KKH5 | AACATTTCATTCAACTGTT | 102 | E53SaCas9KKH33 | TTTTTCCTTTTATTCTAGT |
| | | GCC | | | TGA |
| 75 | E53SaCas9KKH6 | TTCAACTGTTGCCTCCGGT | 76 | E53SaCas9KKH7 | AGGTGTTCTTGTACTTCAT |
| | | TCT | | | CCC |
| 75 | E53SaCas9KKH6 | TTCAACTGTTGCCTCCGGT | 77 | E53SaCas9KKH8 | CTTGTACTTCATCCCACTG |
| | | TCT | | | ATT |
| 75 | E53SaCas9KKH6 | TTCAACTGTTGCCTCCGGT | 78 | E53SaCas9KKH9 | ACTGATTCTGAATTCTTTC |
| | | TCT | | | AAC |
| 75 | E53SaCas9KKH6 | TTCAACTGTTGCCTCCGGT | 84 | E53SaCas9KKH15 | AAAGAAAATCACAGAAACC |
| | | TCT | | | AAG |
| 75 | E53SaCas9KKH6 | TTCAACTGTTGCCTCCGGT | 85 | E53SaCas9KKH16 | TCCAAAAGAAAATCACAGA |
| | | TCT | | | AAC |
| 75 | E53SaCas9KKH6 | TTCAACTGTTGCCTCCGGT | 86 | E53SaCas9KKH17 | ATACAGTAGATGCAATCCA |
| | | TCT | | | AAA |
| 75 | E53SaCas9KKH6 | TTCAACTGTTGCCTCCGGT | 87 | E53SaCas9KKH18 | AGGAGGGTCCCTATACAGT |
| | | TCT | | | AGA |
| 75 | E53SaCas9KKH6 | TTCAACTGTTGCCTCCGGT | 88 | E53SaCas9KKH19 | ATGGAAGGAGGGTCCCTAT |
| | | TCT | | | ACA |
| 75 | E53SaCas9KKH6 | TTCAACTGTTGCCTCCGGT | 89 | E53SaCas9KKH20 | AGTCATGGAAGGAGGGTCC |
| | | TCT | | | CTA |
| 75 | E53SaCas9KKH6 | TTCAACTGTTGCCTCCGGT | 90 | E53SaCas9KKH21 | AGCCAAGCTTGAGTCATGG |
| | | TCT | | | AAG |
| 75 | E53SaCas9KKH6 | TTCAACTGTTGCCTCCGGT | 91 | E53SaCas9KKH22 | TTAGGACAGGCCAGAGCCA |
| | | TCT | | | AGC |
| 75 | E53SaCas9KKH6 | TTCAACTGTTGCCTCCGGT | 92 | E53SaCas9KKH23 | TGGAAGCTAAGGAAGAAGC |
| | | TCT | | | TGA |
| 75 | E53SaCas9KKH6 | TTCAACTGTTGCCTCCGGT | 93 | E53SaCas9KKH24 | AATGAAATGTTAAAGGATT |
| | | TCT | | | CAA |
| 75 | E53SaCas9KKH6 | TTCAACTGTTGCCTCCGGT | 94 | E53SaCas9KKH25 | GCAACAGTTGAATGAAATG |
| | | TCT | | | TTA |
| 75 | E53SaCas9KKH6 | TTCAACTGTTGCCTCCGGT | 95 | E53SaCas9KKH26 | AGAACCGGAGGCAACAGTT |
| | | TCT | | | GAA |
| 75 | E53SaCas9KKH6 | TTCAACTGTTGCCTCCGGT | 96 | E53SaCas9KKH27 | CCTTCAGAACCGGAGGCAA |
| | | TCT | | | CAG |
| 75 | E53SaCas9KKH6 | TTCAACTGTTGCCTCCGGT | 97 | E53SaCas9KKH28 | GAACACCTTCAGAACCGGA |
| | | TCT | | | GGC |
| 75 | E53SaCas9KKH6 | TTCAACTGTTGCCTCCGGT | 98 | E53SaCas9KKH29 | AAAGAATTCAGAATCAGTG |
| | | TCT | | | GGA |
| 75 | E53SaCas9KKH6 | TTCAACTGTTGCCTCCGGT | 99 | E53SaCas9KKH30 | AGTTGAAAGAATTCAGAAT |
| | | TCT | | | CAG |
| 75 | E53SaCas9KKH6 | TTCAACTGTTGCCTCCGGT | 100 | E53SaCas9KKH31 | ATTCTAGTTGAAAGAATTC |
| | | TCT | | | AGA |
| 75 | E53SaCas9KKH6 | TTCAACTGTTGCCTCCGGT | 101 | E53SaCas9KKH32 | TTTTATTCTAGTTGAAAGA |
| | | TCT | | | ATT |
| 75 | E53SaCas9KKH6 | TTCAACTGTTGCCTCCGGT | 102 | E53SaCas9KKH33 | TTTTTCCTTTTATTCTAGT |
| | | TCT | | | TGA |
| 76 | E53SaCas9KKH7 | AGGTGTTCTTGTACTTCAT | 77 | E53SaCas9KKH8 | CTTGTACTTCATCCCACTG |
| | | CCC | | | ATT |
| 76 | E53SaCas9KKH7 | AGGTGTTCTTGTACTTCAT | 78 | E53SaCas9KKH9 | ACTGATTCTGAATTCTTTC |
| | | CCC | | | AAC |
| 76 | E53SaCas9KKH7 | AGGTGTTCTTGTACTTCAT | 84 | E53SaCas9KKH15 | AAAGAAAATCACAGAAACC |
| | | CCC | | | AAG |
| 76 | E53SaCas9KKH7 | AGGTGTTCTTGTACTTCAT | 85 | E53SaCas9KKH16 | TCCAAAAGAAAATCACAGA |
| | | CCC | | | AAC |
| 76 | E53SaCas9KKH7 | AGGTGTTCTTGTACTTCAT | 86 | E53SaCas9KKH17 | ATACAGTAGATGCAATCCA |
| | | CCC | | | AAA |
| 76 | E53SaCas9KKH7 | AGGTGTTCTTGTACTTCAT | 87 | E53SaCas9KKH18 | AGGAGGGTCCCTATACAGT |
| | | CCC | | | AGA |
| 76 | E53SaCas9KKH7 | AGGTGTTCTTGTACTTCAT | 88 | E53SaCas9KKH19 | ATGGAAGGAGGGTCCCTAT |
| | | CCC | | | ACA |
| 76 | E53SaCas9KKH7 | AGGTGTTCTTGTACTTCAT | 89 | E53SaCas9KKH20 | AGTCATGGAAGGAGGGTCC |
| | | CCC | | | CTA |
| 76 | E53SaCas9KKH7 | AGGTGTTCTTGTACTTCAT | 90 | E53SaCas9KKH21 | AGCCAAGCTTGAGTCATGG |
| | | CCC | | | AAG |
| 76 | E53SaCas9KKH7 | AGGTGTTCTTGTACTTCAT | 91 | E53SaCas9KKH22 | TTAGGACAGGCCAGAGCCA |
| | | CCC | | | AGC |
| 76 | E53SaCas9KKH7 | AGGTGTTCTTGTACTTCAT | 92 | E53SaCas9KKH23 | TGGAAGCTAAGGAAGAAGC |
| | | CCC | | | TGA |
| 76 | E53SaCas9KKH7 | AGGTGTTCTTGTACTTCAT | 93 | E53SaCas9KKH24 | AATGAAATGTTAAAGGATT |
| | | CCC | | | CAA |
| 76 | E53SaCas9KKH7 | AGGTGTTCTTGTACTTCAT | 94 | E53SaCas9KKH25 | GCAACAGTTGAATGAAATG |
| | | CCC | | | TTA |
| 76 | E53SaCas9KKH7 | AGGTGTTCTTGTACTTCAT | 95 | E53SaCas9KKH26 | AGAACCGGAGGCAACAGTT |
| | | CCC | | | GAA |
| 76 | E53SaCas9KKH7 | AGGTGTTCTTGTACTTCAT | 96 | E53SaCas9KKH27 | CCTTCAGAACCGGAGGCAA |
| | | CCC | | | CAG |
| 76 | E53SaCas9KKH7 | AGGTGTTCTTGTACTTCAT | 97 | E53SaCas9KKH28 | GAACACCTTCAGAACCGGA |
| | | CCC | | | GGC |
| 76 | E53SaCas9KKH7 | AGGTGTTCTTGTACTTCAT | 98 | E53SaCas9KKH29 | AAAGAATTCAGAATCAGTG |
| | | CCC | | | GGA |
| 76 | E53SaCas9KKH7 | AGGTGTTCTTGTACTTCAT | 99 | E53SaCas9KKH30 | AGTTGAAAGAATTCAGAAT |
| | | CCC | | | CAG |
| 76 | E53SaCas9KKH7 | AGGTGTTCTTGTACTTCAT | 100 | E53SaCas9KKH31 | ATTCTAGTTGAAAGAATTC |
| | | CCC | | | AGA |
| 76 | E53SaCas9KKH7 | AGGTGTTCTTGTACTTCAT | 101 | E53SaCas9KKH32 | TTTTATTCTAGTTGAAAGA |
| | | CCC | | | ATT |
| 76 | E53SaCas9KKH7 | AGGTGTTCTTGTACTTCAT | 102 | E53SaCas9KKH33 | TTTTTCCTTTTATTCTAGT |
| | | CCC | | | TGA |
| 77 | E53SaCas9KKH8 | CTTGTACTTCATCCCACTG | 78 | E53SaCas9KKH9 | ACTGATTCTGAATTCTTTC |
| | | ATT | | | AAC |
| 77 | E53SaCas9KKH8 | CTTGTACTTCATCCCACTG | 84 | E53SaCas9KKH15 | AAAGAAAATCACAGAAACC |
| | | ATT | | | AAG |
| 77 | E53SaCas9KKH8 | CTTGTACTTCATCCCACTG | 85 | E53SaCas9KKH16 | TCCAAAAGAAAATCACAGA |
| | | ATT | | | AAC |
| 77 | E53SaCas9KKH8 | CTTGTACTTCATCCCACTG | 86 | E53SaCas9KKH17 | ATACAGTAGATGCAATCCA |
| | | ATT | | | AAA |
| 77 | E53SaCas9KKH8 | CTTGTACTTCATCCCACTG | 87 | E53SaCas9KKH18 | AGGAGGGTCCCTATACAGT |
| | | ATT | | | AGA |
| 77 | E53SaCas9KKH8 | CTTGTACTTCATCCCACTG | 88 | E53SaCas9KKH19 | ATGGAAGGAGGGTCCCTAT |
| | | ATT | | | ACA |
| 77 | E53SaCas9KKH8 | CTTGTACTTCATCCCACTG | 89 | E53SaCas9KKH20 | AGTCATGGAAGGAGGGTCC |
| | | ATT | | | CTA |
| 77 | E53SaCas9KKH8 | CTTGTACTTCATCCCACTG | 90 | E53SaCas9KKH21 | AGCCAAGCTTGAGTCATGG |
| | | ATT | | | AAG |
| 77 | E53SaCas9KKH8 | CTTGTACTTCATCCCACTG | 91 | E53SaCas9KKH22 | TTAGGACAGGCCAGAGCCA |
| | | ATT | | | AGC |
| 77 | E53SaCas9KKH8 | CTTGTACTTCATCCCACTG | 92 | E53SaCas9KKH23 | TGGAAGCTAAGGAAGAAGC |
| | | ATT | | | TGA |
| 77 | E53SaCas9KKH8 | CTTGTACTTCATCCCACTG | 93 | E53SaCas9KKH24 | AATGAAATGTTAAAGGATT |
| | | ATT | | | CAA |
| 77 | E53SaCas9KKH8 | CTTGTACTTCATCCCACTG | 94 | E53SaCas9KKH25 | GCAACAGTTGAATGAAATG |
| | | ATT | | | TTA |
| 77 | E53SaCas9KKH8 | CTTGTACTTCATCCCACTG | 95 | E53SaCas9KKH26 | AGAACCGGAGGCAACAGTT |
| | | ATT | | | GAA |
| 77 | E53SaCas9KKH8 | CTTGTACTTCATCCCACTG | 96 | E53SaCas9KKH27 | CCTTCAGAACCGGAGGCAA |
| | | ATT | | | CAG |
| 77 | E53SaCas9KKH8 | CTTGTACTTCATCCCACTG | 97 | E53SaCas9KKH28 | GAACACCTTCAGAACCGGA |
| | | ATT | | | GGC |
| 77 | E53SaCas9KKH8 | CTTGTACTTCATCCCACTG | 98 | E53SaCas9KKH29 | AAAGAATTCAGAATCAGTG |
| | | ATT | | | GGA |
| 77 | E53SaCas9KKH8 | CTTGTACTTCATCCCACTG | 99 | E53SaCas9KKH30 | AGTTGAAAGAATTCAGAAT |
| | | ATT | | | CAG |
| 77 | E53SaCas9KKH8 | CTTGTACTTCATCCCACTG | 100 | E53SaCas9KKH31 | ATTCTAGTTGAAAGAATTC |
| | | ATT | | | AGA |
| 77 | E53SaCas9KKH8 | CTTGTACTTCATCCCACTG | 101 | E53SaCas9KKH32 | TTTTATTCTAGTTGAAAGA |
| | | ATT | | | ATT |
| 77 | E53SaCas9KKH8 | CTTGTACTTCATCCCACTG | 102 | E53SaCas9KKH33 | TTTTTCCTTTTATTCTAGT |
| | | ATT | | | TGA |
| 78 | E53SaCas9KKH9 | ACTGATTCTGAATTCTTTC | 84 | E53SaCas9KKH15 | AAAGAAAATCACAGAAACC |
| | | AAC | | | AAG |
| 78 | E53SaCas9KKH9 | ACTGATTCTGAATTCTTTC | 85 | E53SaCas9KKH16 | TCCAAAAGAAAATCACAGA |
| | | AAC | | | AAC |
| 78 | E53SaCas9KKH9 | ACTGATTCTGAATTCTTTC | 86 | E53SaCas9KKH17 | ATACAGTAGATGCAATCCA |
| | | AAC | | | AAA |
| 78 | E53SaCas9KKH9 | ACTGATTCTGAATTCTTTC | 87 | E53SaCas9KKH18 | AGGAGGGTCCCTATACAGT |
| | | AAC | | | AGA |
| 78 | E53SaCas9KKH9 | ACTGATTCTGAATTCTTTC | 88 | E53SaCas9KKH19 | ATGGAAGGAGGGTCCCTAT |
| | | AAC | | | ACA |
| 78 | E53SaCas9KKH9 | ACTGATTCTGAATTCTTTC | 89 | E53SaCas9KKH20 | AGTCATGGAAGGAGGGTCC |
| | | AAC | | | CTA |
| 78 | E53SaCas9KKH9 | ACTGATTCTGAATTCTTTC | 90 | E53SaCas9KKH21 | AGCCAAGCTTGAGTCATGG |
| | | AAC | | | AAG |
| 78 | E53SaCas9KKH9 | ACTGATTCTGAATTCTTTC | 91 | E53SaCas9KKH22 | TTAGGACAGGCCAGAGCCA |
| | | AAC | | | AGC |
| 78 | E53SaCas9KKH9 | ACTGATTCTGAATTCTTTC | 92 | E53SaCas9KKH23 | TGGAAGCTAAGGAAGAAGC |
| | | AAC | | | TGA |
| 78 | E53SaCas9KKH9 | ACTGATTCTGAATTCTTTC | 93 | E53SaCas9KKH24 | AATGAAATGTTAAAGGATT |
| | | AAC | | | CAA |
| 78 | E53SaCas9KKH9 | ACTGATTCTGAATTCTTTC | 94 | E53SaCas9KKH25 | GCAACAGTTGAATGAAATG |
| | | AAC | | | TTA |
| 78 | E53SaCas9KKH9 | ACTGATTCTGAATTCTTTC | 95 | E53SaCas9KKH26 | AGAACCGGAGGCAACAGTT |
| | | AAC | | | GAA |
| 78 | E53SaCas9KKH9 | ACTGATTCTGAATTCTTTC | 96 | E53SaCas9KKH27 | CCTTCAGAACCGGAGGCAA |
| | | AAC | | | CAG |
| 78 | E53SaCas9KKH9 | ACTGATTCTGAATTCTTTC | 97 | E53SaCas9KKH | GAACACCTTCAGAACCGGA |
| | | AAC | | 28 | GGC |
| 78 | E53SaCas9KKH9 | ACTGATTCTGAATTCTTTC | 98 | E53SaCas9KKH | AAAGAATTCAGAATCAGTG |
| | | AAC | | 29 | GGA |
| 78 | E53SaCas9KKH9 | ACTGATTCTGAATTCTTTC | 99 | E53SaCas9KKH | AGTTGAAAGAATTCAGAAT |
| | | AAC | | 30 | CAG |
| 78 | E53SaCas9KKH9 | ACTGATTCTGAATTCTTTC | 100 | E53SaCas9KKH | ATTCTAGTTGAAAGAATTC |
| | | AAC | | 31 | AGA |
| 78 | E53SaCas9KKH9 | ACTGATTCTGAATTCTTTC | 101 | E53SaCas9KKH | TTTTATTCTAGTTGAAAGA |
| | | AAC | | 32 | ATT |
| 78 | E53SaCas9KKH9 | ACTGATTCTGAATTCTTTC | 102 | E53SaCas9KKH | TTTTTCCTTTTATTCTAGT |
| | | AAC | | 33 | TGA |
| 84 | E53SaCas9KKH | AAAGAAAATCACAGAAACC | 85 | E53SaCas9KKH | TCCAAAAGAAAATCACAGA |
| | 15 | AAG | | 16 | AAC |
| 84 | E53SaCas9KKH | AAAGAAAATCACAGAAACC | 86 | E53SaCas9KKH | ATACAGTAGATGCAATCCA |
| | 15 | AAG | | 17 | AAA |
| 84 | E53SaCas9KKH | AAAGAAAATCACAGAAACC | 87 | E53SaCas9KKH | AGGAGGGTCCCTATACAGT |
| | 15 | AAG | | 18 | AGA |
| 84 | E53SaCas9KKH | AAAGAAAATCACAGAAACC | 88 | E53SaCas9KKH | ATGGAAGGAGGGTCCCTAT |
| | 15 | AAG | | 19 | ACA |
| 84 | E53SaCas9KKH | AAAGAAAATCACAGAAACC | 89 | E53SaCas9KKH | AGTCATGGAAGGAGGGTCC |
| | 15 | AAG | | 20 | CTA |
| 84 | E53SaCas9KKH | AAAGAAAATCACAGAAACC | 90 | E53SaCas9KKH | AGCCAAGCTTGAGTCATGG |
| | 15 | AAG | | 21 | AAG |
| 84 | E53SaCas9KKH | AAAGAAAATCACAGAAACC | 91 | E53SaCas9KKH | TTAGGACAGGCCAGAGCCA |
| | 15 | AAG | | 22 | AGC |
| 84 | E53SaCas9KKH | AAAGAAAATCACAGAAACC | 92 | E53SaCas9KKH | TGGAAGCTAAGGAAGAAGC |
| | 15 | AAG | | 23 | TGA |
| 84 | E53SaCas9KKH | AAAGAAAATCACAGAAACC | 93 | E53SaCas9KKH | AATGAAATGTTAAAGGATT |
| | 15 | AAG | | 24 | CAA |
| 84 | E53SaCas9KKH | AAAGAAAATCACAGAAACC | 94 | E53SaCas9KKH | GCAACAGTTGAATGAAATG |
| | 15 | AAG | | 25 | TTA |
| 84 | E53SaCas9KKH | AAAGAAAATCACAGAAACC | 95 | E53SaCas9KKH | AGAACCGGAGGCAACAGTT |
| | 15 | AAG | | 26 | GAA |
| 84 | E53SaCas9KKH | AAAGAAAATCACAGAAACC | 96 | E53SaCas9KKH | CCTTCAGAACCGGAGGCAA |
| | 15 | AAG | | 27 | CAG |
| 84 | E53SaCas9KKH | AAAGAAAATCACAGAAACC | 97 | E53SaCas9KKH | GAACACCTTCAGAACCGGA |
| | 15 | AAG | | 28 | GGC |
| 84 | E53SaCas9KKH | AAAGAAAATCACAGAAACC | 98 | E53SaCas9KKH | AAAGAATTCAGAATCAGTG |
| | 15 | AAG | | 29 | GGA |
| 84 | E53SaCas9KKH | AAAGAAAATCACAGAAACC | 99 | E53SaCas9KKH | AGTTGAAAGAATTCAGAAT |
| | 15 | AAG | | 30 | CAG |
| 84 | E53SaCas9KKH | AAAGAAAATCACAGAAACC | 100 | E53SaCas9KKH | ATTCTAGTTGAAAGAATTC |
| | 15 | AAG | | 31 | AGA |
| 84 | E53SaCas9KKH | AAAGAAAATCACAGAAACC | 101 | E53SaCas9KKH | TTTTATTCTAGTTGAAAGA |
| | 15 | AAG | | 32 | ATT |
| 84 | E53SaCas9KKH | AAAGAAAATCACAGAAACC | 102 | E53SaCas9KKH | TTTTTCCTTTTATTCTAGT |
| | 15 | AAG | | 33 | TGA |
| 85 | E53SaCas9KKH | TCCAAAAGAAAATCACAGA | 86 | E53SaCas9KKH | ATACAGTAGATGCAATCCA |
| | 16 | AAC | | 17 | AAA |
| 85 | E53SaCas9KKH | TCCAAAAGAAAATCACAGA | 87 | E53SaCas9KKH | AGGAGGGTCCCTATACAGT |
| | 16 | AAC | | 18 | AGA |
| 85 | E53SaCas9KKH | TCCAAAAGAAAATCACAGA | 88 | E53SaCas9KKH | ATGGAAGGAGGGTCCCTAT |
| | 16 | AAC | | 19 | ACA |
| 85 | E53SaCas9KKH | TCCAAAAGAAAATCACAGA | 89 | E53SaCas9KKH | AGTCATGGAAGGAGGGTCC |
| | 16 | AAC | | 20 | CTA |
| 85 | E53SaCas9KKH | TCCAAAAGAAAATCACAGA | 90 | E53SaCas9KKH | AGCCAAGCTTGAGTCATGG |
| | 16 | AAC | | 21 | AAG |
| 85 | E53SaCas9KKH | TCCAAAAGAAAATCACAGA | 91 | E53SaCas9KKH | TTAGGACAGGCCAGAGCCA |
| | 16 | AAC | | 22 | AGC |
| 85 | E53SaCas9KKH | TCCAAAAGAAAATCACAGA | 92 | E53SaCas9KKH | TGGAAGCTAAGGAAGAAGC |
| | 16 | AAC | | 23 | TGA |
| 85 | E53SaCas9KKH | TCCAAAAGAAAATCACAGA | 93 | E53SaCas9KKH | AATGAAATGTTAAAGGATT |
| | 16 | AAC | | 24 | CAA |
| 85 | E53SaCas9KKH | TCCAAAAGAAAATCACAGA | 94 | E53SaCas9KKH | GCAACAGTTGAATGAAATG |
| | 16 | AAC | | 25 | TTA |
| 85 | E53SaCas9KKH | TCCAAAAGAAAATCACAGA | 95 | E53SaCas9KKH | AGAACCGGAGGCAACAGTT |
| | 16 | AAC | | 26 | GAA |
| 85 | E53SaCas9KKH | TCCAAAAGAAAATCACAGA | 96 | E53SaCas9KKH | CCTTCAGAACCGGAGGCAA |
| | 16 | AAC | | 27 | CAG |
| 85 | E53SaCas9KKH | TCCAAAAGAAAATCACAGA | 97 | E53SaCas9KKH | GAACACCTTCAGAACCGGA |
| | 16 | AAC | | 28 | GGC |
| 85 | E53SaCas9KKH | TCCAAAAGAAAATCACAGA | 98 | E53SaCas9KKH | AAAGAATTCAGAATCAGTG |
| | 16 | AAC | | 29 | GGA |
| 85 | E53SaCas9KKH | TCCAAAAGAAAATCACAGA | 99 | E53SaCas9KKH | AGTTGAAAGAATTCAGAAT |
| | 16 | AAC | | 30 | CAG |
| 85 | E53SaCas9KKH | TCCAAAAGAAAATCACAGA | 100 | E53SaCas9KKH | ATTCTAGTTGAAAGAATTC |
| | 16 | AAC | | 31 | AGA |
| 85 | E53SaCas9KKH | TCCAAAAGAAAATCACAGA | 101 | E53SaCas9KKH | TTTTATTCTAGTTGAAAGA |
| | 16 | AAC | | 32 | ATT |
| 85 | E53SaCas9KKH | TCCAAAAGAAAATCACAGA | 102 | E53SaCas9KKH | TTTTTCCTTTTATTCTAGT |
| | 16 | AAC | | 33 | TGA |
| 86 | E53SaCas9KKH | ATACAGTAGATGCAATCCA | 87 | E53SaCas9KKH | AGGAGGGTCCCTATACAGT |
| | 17 | AAA | | 18 | AGA |
| 86 | E53SaCas9KKH | ATACAGTAGATGCAATCCA | 88 | E53SaCas9KKH | ATGGAAGGAGGGTCCCTAT |
| | 17 | AAA | | 19 | ACA |
| 86 | E53SaCas9KKH | ATACAGTAGATGCAATCCA | 89 | E53SaCas9KKH | AGTCATGGAAGGAGGGTCC |
| | 17 | AAA | | 20 | CTA |
| 86 | E53SaCas9KKH | ATACAGTAGATGCAATCCA | 90 | E53SaCas9KKH | AGCCAAGCTTGAGTCATGG |
| | 17 | AAA | | 21 | AAG |
| 86 | E53SaCas9KKH | ATACAGTAGATGCAATCCA | 91 | E53SaCas9KKH | TTAGGACAGGCCAGAGCCA |
| | 17 | AAA | | 22 | AGC |
| 86 | E53SaCas9KKH | ATACAGTAGATGCAATCCA | 92 | E53SaCas9KKH | TGGAAGCTAAGGAAGAAGC |
| | 17 | AAA | | 23 | TGA |
| 86 | E53SaCas9KKH | ATACAGTAGATGCAATCCA | 93 | E53SaCas9KKH | AATGAAATGTTAAAGGATT |
| | 17 | AAA | | 24 | CAA |
| 86 | E53SaCas9KKH | ATACAGTAGATGCAATCCA | 94 | E53SaCas9KKH | GCAACAGTTGAATGAAATG |
| | 17 | AAA | | 25 | TTA |
| 86 | E53SaCas9KKH | ATACAGTAGATGCAATCCA | 95 | E53SaCas9KKH | AGAACCGGAGGCAACAGTT |
| | 17 | AAA | | 26 | GAA |
| 86 | E53SaCas9KKH | ATACAGTAGATGCAATCCA | 96 | E53SaCas9KKH | CCTTCAGAACCGGAGGCAA |
| | 17 | AAA | | 27 | CAG |
| 86 | E53SaCas9KKH | ATACAGTAGATGCAATCCA | 97 | E53SaCas9KKH | GAACACCTTCAGAACCGGA |
| | 17 | AAA | | 28 | GGC |
| 86 | E53SaCas9KKH | ATACAGTAGATGCAATCCA | 98 | E53SaCas9KKH | AAAGAATTCAGAATCAGTG |
| | 17 | AAA | | 29 | GGA |
| 86 | E53SaCas9KKH | ATACAGTAGATGCAATCCA | 99 | E53SaCas9KKH | AGTTGAAAGAATTCAGAAT |
| | 17 | AAA | | 30 | CAG |
| 86 | E53SaCas9KKH | ATACAGTAGATGCAATCCA | 100 | E53SaCas9KKH | ATTCTAGTTGAAAGAATTC |
| | 17 | AAA | | 31 | AGA |
| 86 | E53SaCas9KKH | ATACAGTAGATGCAATCCA | 101 | E53SaCas9KKH | TTTTATTCTAGTTGAAAGA |
| | 17 | AAA | | 32 | ATT |
| 86 | E53SaCas9KKH | ATACAGTAGATGCAATCCA | 102 | E53SaCas9KKH | TTTTTCCTTTTATTCTAGT |
| | 17 | AAA | | 33 | TGA |
| 87 | E53SaCas9KKH | AGGAGGGTCCCTATACAGT | 88 | E53SaCas9KKH | ATGGAAGGAGGGTCCCTAT |
| | 18 | AGA | | 19 | ACA |
| 87 | E53SaCas9KKH | AGGAGGGTCCCTATACAGT | 89 | E53SaCas9KKH | AGTCATGGAAGGAGGGTCC |
| | 18 | AGA | | 20 | CTA |
| 87 | E53SaCas9KKH | AGGAGGGTCCCTATACAGT | 90 | E53SaCas9KKH | AGCCAAGCTTGAGTCATGG |
| | 18 | AGA | | 21 | AAG |
| 87 | E53SaCas9KKH | AGGAGGGTCCCTATACAGT | 91 | E53SaCas9KKH | TTAGGACAGGCCAGAGCCA |
| | 18 | AGA | | 22 | AGC |
| 87 | E53SaCas9KKH | AGGAGGGTCCCTATACAGT | 92 | E53SaCas9KKH | TGGAAGCTAAGGAAGAAGC |
| | 18 | AGA | | 23 | TGA |
| 87 | E53SaCas9KKH | AGGAGGGTCCCTATACAGT | 93 | E53SaCas9KKH | AATGAAATGTTAAAGGATT |
| | 18 | AGA | | 24 | CAA |
| 87 | E53SaCas9KKH | AGGAGGGTCCCTATACAGT | 94 | E53SaCas9KKH | GCAACAGTTGAATGAAATG |
| | 18 | AGA | | 25 | TTA |
| 87 | E53SaCas9KKH | AGGAGGGTCCCTATACAGT | 95 | E53SaCas9KKH | AGAACCGGAGGCAACAGTT |
| | 18 | AGA | | 26 | GAA |
| 87 | E53SaCas9KKH | AGGAGGGTCCCTATACAGT | 96 | E53SaCas9KKH | CCTTCAGAACCGGAGGCAA |
| | 18 | AGA | | 27 | CAG |
| 87 | E53SaCas9KKH | AGGAGGGTCCCTATACAGT | 97 | E53SaCas9KKH | GAACACCTTCAGAACCGGA |
| | 18 | AGA | | 28 | GGC |
| 87 | E53SaCas9KKH | AGGAGGGTCCCTATACAGT | 98 | E53SaCas9KKH | AAAGAATTCAGAATCAGTG |
| | 18 | AGA | | 29 | GGA |
| 87 | E53SaCas9KKH | AGGAGGGTCCCTATACAGT | 99 | E53SaCas9KKH | AGTTGAAAGAATTCAGAAT |
| | 18 | AGA | | 30 | CAG |
| 87 | E53SaCas9KKH | AGGAGGGTCCCTATACAGT | 100 | E53SaCas9KKH | ATTCTAGTTGAAAGAATTC |
| | 18 | AGA | | 31 | AGA |
| 87 | E53SaCas9KKH | AGGAGGGTCCCTATACAGT | 101 | E53SaCas9KKH | TTTTATTCTAGTTGAAAGA |
| | 18 | AGA | | 32 | ATT |
| 87 | E53SaCas9KKH | AGGAGGGTCCCTATACAGT | 102 | E53SaCas9KKH | TTTTTCCTTTTATTCTAGT |
| | 18 | AGA | | 33 | TGA |
| 88 | E53SaCas9KKH | ATGGAAGGAGGGTCCCTAT | 89 | E53SaCas9KKH | AGTCATGGAAGGAGGGTCC |
| | 19 | ACA | | 20 | CTA |
| 88 | E53SaCas9KKH | ATGGAAGGAGGGTCCCTAT | 90 | E53SaCas9KKH | AGCCAAGCTTGAGTCATGG |
| | 19 | ACA | | 21 | AAG |
| 88 | E53SaCas9KKH | ATGGAAGGAGGGTCCCTAT | 91 | E53SaCas9KKH | TTAGGACAGGCCAGAGCCA |
| | 19 | ACA | | 22 | AGC |
| 88 | E53SaCas9KKH | ATGGAAGGAGGGTCCCTAT | 92 | E53SaCas9KKH | TGGAAGCTAAGGAAGAAGC |
| | 19 | ACA | | 23 | TGA |
| 88 | E53SaCas9KKH | ATGGAAGGAGGGTCCCTAT | 93 | E53SaCas9KKH | AATGAAATGTTAAAGGATT |
| | 19 | ACA | | 24 | CAA |
| 88 | E53SaCas9KKH | ATGGAAGGAGGGTCCCTAT | 94 | E53SaCas9KKH | GCAACAGTTGAATGAAATG |
| | 19 | ACA | | 25 | TTA |
| 88 | E53SaCas9KKH | ATGGAAGGAGGGTCCCTAT | 95 | E53SaCas9KKH | AGAACCGGAGGCAACAGTT |
| | 19 | ACA | | 26 | GAA |
| 88 | E53SaCas9KKH | ATGGAAGGAGGGTCCCTAT | 96 | E53SaCas9KKH | CCTTCAGAACCGGAGGCAA |
| | 19 | ACA | | 27 | CAG |
| 88 | E53SaCas9KKH | ATGGAAGGAGGGTCCCTAT | 97 | E53SaCas9KKH | GAACACCTTCAGAACCGGA |
| | 19 | ACA | | 28 | GGC |
| 88 | E53SaCas9KKH | ATGGAAGGAGGGTCCCTAT | 98 | E53SaCas9KKH | AAAGAATTCAGAATCAGTG |
| | 19 | ACA | | 29 | GGA |
| 88 | E53SaCas9KKH | ATGGAAGGAGGGTCCCTAT | 99 | E53SaCas9KKH | AGTTGAAAGAATTCAGAAT |
| | 19 | ACA | | 30 | CAG |
| 88 | E53SaCas9KKH | ATGGAAGGAGGGTCCCTAT | 100 | E53SaCas9KKH | ATTCTAGTTGAAAGAATTC |
| | 19 | ACA | | 31 | AGA |
| 88 | E53SaCas9KKH | ATGGAAGGAGGGTCCCTAT | 101 | E53SaCas9KKH | TTTTATTCTAGTTGAAAGA |
| | 19 | ACA | | 32 | ATT |
| 88 | E53SaCas9KKH | ATGGAAGGAGGGTCCCTAT | 102 | E53SaCas9KKH | TTTTTCCTTTTATTCTAGT |
| | 19 | ACA | | 33 | TGA |
| 89 | E53SaCas9KKH | AGTCATGGAAGGAGGGTCC | 90 | E53SaCas9KKH | AGCCAAGCTTGAGTCATGG |
| | 20 | CTA | | 21 | AAG |
| 89 | E53SaCas9KKH | AGTCATGGAAGGAGGGTCC | 91 | E53SaCas9KKH | TTAGGACAGGCCAGAGCCA |
| | 20 | CTA | | 22 | AGC |
| 89 | E53SaCas9KKH | AGTCATGGAAGGAGGGTCC | 92 | E53SaCas9KKH | TGGAAGCTAAGGAAGAAGC |
| | 20 | CTA | | 23 | TGA |
| 89 | E53SaCas9KKH | AGTCATGGAAGGAGGGTCC | 93 | E53SaCas9KKH | AATGAAATGTTAAAGGATT |
| | 20 | CTA | | 24 | CAA |
| 89 | E53SaCas9KKH | AGTCATGGAAGGAGGGTCC | 94 | E53SaCas9KKH | GCAACAGTTGAATGAAATG |
| | 20 | CTA | | 25 | TTA |
| 89 | E53SaCas9KKH | AGTCATGGAAGGAGGGTCC | 95 | E53SaCas9KKH | AGAACCGGAGGCAACAGTT |
| | 20 | CTA | | 26 | GAA |
| 89 | E53SaCas9KKH | AGTCATGGAAGGAGGGTCC | 96 | E53SaCas9KKH | CCTTCAGAACCGGAGGCAA |
| | 20 | CTA | | 27 | CAG |
| 89 | E53SaCas9KKH | AGTCATGGAAGGAGGGTCC | 97 | E53SaCas9KKH | GAACACCTTCAGAACCGGA |
| | 20 | CTA | | 28 | GGC |
| 89 | E53SaCas9KKH | AGTCATGGAAGGAGGGTCC | 98 | E53SaCas9KKH | AAAGAATTCAGAATCAGTG |
| | 20 | CTA | | 29 | GGA |
| 89 | E53SaCas9KKH | AGTCATGGAAGGAGGGTCC | 99 | E53SaCas9KKH | AGTTGAAAGAATTCAGAAT |
| | 20 | CTA | | 30 | CAG |
| 89 | E53SaCas9KKH | AGTCATGGAAGGAGGGTCC | 100 | E53SaCas9KKH | ATTCTAGTTGAAAGAATTC |
| | 20 | CTA | | 31 | AGA |
| 89 | E53SaCas9KKH | AGTCATGGAAGGAGGGTCC | 101 | E53SaCas9KKH | TTTTATTCTAGTTGAAAGA |
| | 20 | CTA | | 32 | ATT |
| 89 | E53SaCas9KKH | AGTCATGGAAGGAGGGTCC | 102 | E53SaCas9KKH | TTTTTCCTTTTATTCTAGT |
| | 20 | CTA | | 33 | TGA |
| 90 | E53SaCas9KKH | AGCCAAGCTTGAGTCATGG | 91 | E53SaCas9KKH | TTAGGACAGGCCAGAGCCA |
| | 21 | AAG | | 22 | AGC |
| 90 | E53SaCas9KKH | AGCCAAGCTTGAGTCATGG | 92 | E53SaCas9KKH | TGGAAGCTAAGGAAGAAGC |
| | 21 | AAG | | 23 | TGA |
| 9C | E53SaCas9KKH | AGCCAAGCTTGAGTCATGG | 93 | E53SaCas9KKH | AATGAAATGTTAAAGGATT |
| | 21 | AAG | | 24 | CAA |
| 90 | E53SaCas9KKH | AGCCAAGCTTGAGTCATGG | 94 | E53SaCas9KKH | GCAACAGTTGAATGAAATG |
| | 21 | AAG | | 25 | TTA |
| 90 | E53SaCas9KKH | AGCCAAGCTTGAGTCATGG | 95 | E53SaCas9KKH | AGAACCGGAGGCAACAGTT |
| | 21 | AAG | | 26 | GAA |
| 90 | E53SaCas9KKH | AGCCAAGCTTGAGTCATGG | 96 | E53SaCas9KKH | CCTTCAGAACCGGAGGCAA |
| | 21 | AAG | | 27 | CAG |
| 90 | E53SaCas9KKH | AGCCAAGCTTGAGTCATGG | 97 | E53SaCas9KKH | GAACACCTTCAGAACCGGA |
| | 21 | AAG | | 28 | GGC |
| 90 | E53SaCas9KKH | AGCCAAGCTTGAGTCATGG | 98 | E53SaCas9KKH | AAAGAATTCAGAATCAGTG |
| | 21 | AAG | | 29 | GGA |
| 90 | E53SaCas9KKH | AGCCAAGCTTGAGTCATGG | 99 | E53SaCas9KKH | AGTTGAAAGAATTCAGAAT |
| | 21 | AAG | | 30 | CAG |
| 90 | E53SaCas9KKH | AGCCAAGCTTGAGTCATGG | 100 | E53SaCas9KKH | ATTCTAGTTGAAAGAATTC |
| | 21 | AAG | | 31 | AGA |
| 90 | E53SaCas9KKH | AGCCAAGCTTGAGTCATGG | 101 | E53SaCas9KKH | TTTTATTCTAGTTGAAAGA |
| | 21 | AAG | | 32 | ATT |
| 90 | E53SaCas9KKH | AGCCAAGCTTGAGTCATGG | 102 | E53SaCas9KKH | TTTTTCCTTTTATTCTAGT |
| | 21 | AAG | | 33 | TGA |
| 91 | E53SaCas9KKH | TTAGGACAGGCCAGAGCCA | 92 | E53SaCas9KKH | TGGAAGCTAAGGAAGAAGC |
| | 22 | AGC | | 23 | TGA |
| 91 | E53SaCas9KKH | TTAGGACAGGCCAGAGCCA | 93 | E53SaCas9KKH | AATGAAATGTTAAAGGATT |
| | 22 | AGC | | 24 | CAA |
| 91 | E53SaCas9KKH | TTAGGACAGGCCAGAGCCA | 94 | E53SaCas9KKH | GCAACAGTTGAATGAAATG |
| | 22 | AGC | | 25 | TTA |
| 91 | E53SaCas9KKH | TTAGGACAGGCCAGAGCCA | 95 | E53SaCas9KKH | AGAACCGGAGGCAACAGTT |
| | 22 | AGC | | 26 | GAA |
| 91 | E53SaCas9KKH | TTAGGACAGGCCAGAGCCA | 96 | E53SaCas9KKH | CCTTCAGAACCGGAGGCAA |
| | 22 | AGC | | 27 | CAG |
| 91 | E53SaCas9KKH | TTAGGACAGGCCAGAGCCA | 97 | E53SaCas9KKH | GAACACCTTCAGAACCGGA |
| | 22 | AGC | | 28 | GGC |
| 91 | E53SaCas9KKH | TTAGGACAGGCCAGAGCCA | 98 | E53SaCas9KKH | AAAGAATTCAGAATCAGTG |
| | 22 | AGC | | 29 | GGA |
| 91 | E53SaCas9KKH | TTAGGACAGGCCAGAGCCA | 99 | E53SaCas9KKH | AGTTGAAAGAATTCAGAAT |
| | 22 | AGC | | 30 | CAG |
| 91 | E53SaCas9KKH | TTAGGACAGGCCAGAGCCA | 100 | E53SaCas9KKH | ATTCTAGTTGAAAGAATTC |
| | 22 | AGC | | 31 | AGA |
| 91 | E53SaCas9KKH | TTAGGACAGGCCAGAGCCA | 101 | E53SaCas9KKH | TTTTATTCTAGTTGAAAGA |
| | 22 | AGC | | 32 | ATT |
| 91 | E53SaCas9KKH | TTAGGACAGGCCAGAGCCA | 102 | E53SaCas9KKH | TTTTTCCTTTTATTCTAGT |
| | 22 | AGC | | 33 | TGA |
| 92 | E53SaCas9KKH | TGGAAGCTAAGGAAGAAGC | 93 | E53SaCas9KKH | AATGAAATGTTAAAGGATT |
| | 23 | TGA | | 24 | CAA |
| 92 | E53SaCas9KKH | TGGAAGCTAAGGAAGAAGC | 94 | E53SaCas9KKH | GCAACAGTTGAATGAAATG |
| | 23 | TGA | | 25 | TTA |
| 92 | E53SaCas9KKH | TGGAAGCTAAGGAAGAAGC | 95 | E53SaCas9KKH | AGAACCGGAGGCAACAGTT |
| | 23 | TGA | | 26 | GAA |
| 92 | E53SaCas9KKH | TGGAAGCTAAGGAAGAAGC | 96 | E53SaCas9KKH | CCTTCAGAACCGGAGGCAA |
| | 23 | TGA | | 27 | CAG |
| 92 | E53SaCas9KKH | TGGAAGCTAAGGAAGAAGC | 97 | E53SaCas9KKH | GAACACCTTCAGAACCGGA |
| | 23 | TGA | | 28 | GGC |
| 92 | E53SaCas9KKH | TGGAAGCTAAGGAAGAAGC | 98 | E53SaCas9KKH | AAAGAATTCAGAATCAGTG |
| | 23 | TGA | | 29 | GGA |
| 92 | E53SaCas9KKH | TGGAAGCTAAGGAAGAAGC | 99 | E53SaCas9KKH | AGTTGAAAGAATTCAGAAT |
| | 23 | TGA | | 30 | CAG |
| 92 | E53SaCas9KKH | TGGAAGCTAAGGAAGAAGC | 100 | E53SaCas9KKH | ATTCTAGTTGAAAGAATTC |
| | 23 | TGA | | 31 | AGA |
| 92 | E53SaCas9KKH | TGGAAGCTAAGGAAGAAGC | 101 | E53SaCas9KKH | TTTTATTCTAGTTGAAAGA |
| | 23 | TGA | | 32 | ATT |
| 92 | E53SaCas9KKH | TGGAAGCTAAGGAAGAAGC | 102 | E53SaCas9KKH | TTTTTCCTTTTATTCTAGT |
| | 23 | TGA | | 33 | TGA |
| 93 | E53SaCas9KKH | AATGAAATGTTAAAGGATT | 94 | E53SaCas9KKH | GCAACAGTTGAATGAAATG |
| | 24 | CAA | | 25 | TTA |
| 93 | E53SaCas9KKH | AATGAAATGTTAAAGGATT | 95 | E53SaCas9KKH | AGAACCGGAGGCAACAGTT |
| | 24 | CAA | | 26 | GAA |
| 93 | E53SaCas9KKH | AATGAAATGTTAAAGGATT | 96 | E53SaCas9KKH | CCTTCAGAACCGGAGGCAA |
| | 24 | CAA | | 27 | CAG |
| 93 | E53SaCas9KKH | AATGAAATGTTAAAGGATT | 97 | E53SaCas9KKH | GAACACCTTCAGAACCGGA |
| | 24 | CAA | | 28 | GGC |
| 93 | E53SaCas9KKH | AATGAAATGTTAAAGGATT | 98 | E53SaCas9KKH | AAAGAATTCAGAATCAGTG |
| | 24 | CAA | | 29 | GGA |
| 93 | E53SaCas9KKH | AATGAAATGTTAAAGGATT | 99 | E53SaCas9KKH | AGTTGAAAGAATTCAGAAT |
| | 24 | CAA | | 30 | CAG |
| 93 | E53SaCas9KKH | AATGAAATGTTAAAGGATT | 100 | E53SaCas9KKH | ATTCTAGTTGAAAGAATTC |
| | 24 | CAA | | 31 | AGA |
| 93 | E53SaCas9KKH | AATGAAATGTTAAAGGATT | 101 | E53SaCas9KKH | TTTTATTCTAGTTGAAAGA |
| | 24 | CAA | | 32 | ATT |
| 93 | E53SaCas9KKH | AATGAAATGTTAAAGGATT | 102 | E53SaCas9KKH | TTTTTCCTTTTATTCTAGT |
| | 24 | CAA | | 33 | TGA |
| 94 | E53SaCas9KKH | GCAACAGTTGAATGAAATG | 95 | E53SaCas9KKH | AGAACCGGAGGCAACAGTT |
| | 25 | TTA | | 26 | GAA |
| 94 | E53SaCas9KKH | GCAACAGTTGAATGAAATG | 96 | E53SaCas9KKH | CCTTCAGAACCGGAGGCAA |
| | 25 | TTA | | 27 | CAG |
| 94 | E53SaCas9KKH | GCAACAGTTGAATGAAATG | 97 | E53SaCas9KKH | GAACACCTTCAGAACCGGA |
| | 25 | TTA | | 28 | GGC |
| 94 | E53SaCas9KKH | GCAACAGTTGAATGAAATG | 98 | E53SaCas9KKH | AAAGAATTCAGAATCAGTG |
| | 25 | TTA | | 29 | GGA |
| 94 | E53SaCas9KKH | GCAACAGTTGAATGAAATG | 99 | E53SaCas9KKH | AGTTGAAAGAATTCAGAAT |
| | 25 | TTA | | 30 | CAG |
| 94 | E53SaCas9KKH | GCAACAGTTGAATGAAATG | 100 | E53SaCas9KKH | ATTCTAGTTGAAAGAATTC |
| | 25 | TTA | | 31 | AGA |
| 94 | E53SaCas9KKH | GCAACAGTTGAATGAAATG | 101 | E53SaCas9KKH | TTTTATTCTAGTTGAAAGA |
| | 25 | TTA | | 32 | ATT |
| 94 | E53SaCas9KKH | GCAACAGTTGAATGAAATG | 102 | E53SaCas9KKH | TTTTTCCTTTTATTCTAGT |
| | 25 | TTA | | 33 | TGA |
| 95 | E53SaCas9KKH | AGAACCGGAGGCAACAGTT | 96 | E53SaCas9KKH | CCTTCAGAACCGGAGGCAA |
| | 26 | GAA | | 27 | CAG |
| 95 | E53SaCas9KKH | AGAACCGGAGGCAACAGTT | 97 | E53SaCas9KKH | GAACACCTTCAGAACCGGA |
| | 26 | GAA | | 28 | GGC |
| 95 | E53SaCas9KKH | AGAACCGGAGGCAACAGTT | 98 | E53SaCas9KKH | AAAGAATTCAGAATCAGTG |
| | 26 | GAA | | 29 | GGA |
| 95 | E53SaCas9KKH | AGAACCGGAGGCAACAGTT | 99 | E53SaCas9KKH | AGTTGAAAGAATTCAGAAT |
| | 26 | GAA | | 30 | CAG |
| 95 | E53SaCas9KKH | AGAACCGGAGGCAACAGTT | 100 | E53SaCas9KKH | ATTCTAGTTGAAAGAATTC |
| | 26 | GAA | | 31 | AGA |
| 95 | E53SaCas9KKH | AGAACCGGAGGCAACAGTT | 101 | E53SaCas9KKH | TTTTATTCTAGTTGAAAGA |
| | 26 | GAA | | 32 | ATT |
| 95 | E53SaCas9KKH | AGAACCGGAGGCAACAGTT | 102 | E53SaCas9KKH | TTTTTCCTTTTATTCTAGT |
| | 26 | GAA | | 33 | TGA |
| 96 | E53SaCas9KKH | CCTTCAGAACCGGAGGCAA | 97 | E53SaCas9KKH | GAACACCTTCAGAACCGGA |
| | 27 | CAG | | 28 | GGC |
| 96 | E53SaCas9KKH | CCTTCAGAACCGGAGGCAA | 98 | E53SaCas9KKH | AAAGAATTCAGAATCAGTG |
| | 27 | CAG | | 29 | GGA |
| 96 | E53SaCas9KKH | CCTTCAGAACCGGAGGCAA | 99 | E53SaCas9KKH | AGTTGAAAGAATTCAGAAT |
| | 27 | CAG | | 30 | CAG |
| 96 | E53SaCas9KKH | CCTTCAGAACCGGAGGCAA | 100 | E53SaCas9KKH | ATTCTAGTTGAAAGAATTC |
| | 27 | CAG | | 31 | AGA |
| 96 | E53SaCas9KKH | CCTTCAGAACCGGAGGCAA | 101 | E53SaCas9KKH | TTTTATTCTAGTTGAAAGA |
| | 27 | CAG | | 32 | ATT |
| 96 | E53SaCas9KKH | CCTTCAGAACCGGAGGCAA | 102 | E53SaCas9KKH | TTTTTCCTTTTATTCTAGT |
| | 27 | CAG | | 33 | TGA |
| 97 | E53SaCas9KKH | GAACACCTTCAGAACCGGA | 98 | E53SaCas9KKH | AAAGAATTCAGAATCAGTG |
| | 28 | GGC | | 29 | GGA |
| 97 | E53SaCas9KKH | GAACACCTTCAGAACCGGA | 99 | E53SaCas9KKH | AGTTGAAAGAATTCAGAAT |
| | 28 | GGC | | 30 | CAG |
| 97 | E53SaCas9KKH | GAACACCTTCAGAACCGGA | 100 | E53SaCas9KKH | ATTCTAGTTGAAAGAATTC |
| | 28 | GGC | | 31 | AGA |
| 97 | E53SaCas9KKH | GAACACCTTCAGAACCGGA | 101 | E53SaCas9KKH | TTTTATTCTAGTTGAAAGA |
| | 28 | GGC | | 32 | ATT |
| 97 | E53SaCas9KKH | GAACACCTTCAGAACCGGA | 102 | E53SaCas9KKH | TTTTTCCTTTTATTCTAGT |
| | 28 | GGC | | 33 | TGA |
| 98 | E53SaCas9KKH | AAAGAATTCAGAATCAGTG | 99 | E53SaCas9KKH | AGTTGAAAGAATTCAGAAT |
| | 29 | GGA | | 30 | CAG |
| 98 | E53SaCas9KKH | AAAGAATTCAGAATCAGTG | 100 | E53SaCas9KKH | ATTCTAGTTGAAAGAATTC |
| | 29 | GGA | | 31 | AGA |
| 98 | E53SaCas9KKH | AAAGAATTCAGAATCAGTG | 101 | E53SaCas9KKH | TTTTATTCTAGTTGAAAGA |
| | 29 | GGA | | 32 | ATT |
| 98 | E53SaCas9KKH | AAAGAATTCAGAATCAGTG | 102 | E53SaCas9KKH | TTTTTCCTTTTATTCTAGT |
| | 29 | GGA | | 33 | TGA |
| 99 | E53SaCas9KKH | AGTTGAAAGAATTCAGAAT | 100 | E53SaCas9KKH | ATTCTAGTTGAAAGAATTC |
| | 30 | CAG | | 31 | AGA |
| 99 | E53SaCas9KKH | AGTTGAAAGAATTCAGAAT | 101 | E53SaCas9KKH | TTTTATTCTAGTTGAAAGA |
| | 30 | CAG | | 32 | ATT |
| 99 | E53SaCas9KKH | AGTTGAAAGAATTCAGAAT | 102 | E53SaCas9KKH | TTTTTCCTTTTATTCTAGT |
| | 30 | CAG | | 33 | TGA |
| 100 | E53SaCas9KKH | ATTCTAGTTGAAAGAATTC | 101 | E53SaCas9KKH | TTTTATTCTAGTTGAAAGA |
| | 31 | AGA | | 32 | ATT |
| 100 | E53SaCas9KKH | ATTCTAGTTGAAAGAATTC | 102 | E53SaCas9KKH | TTTTTCCTTTTATTCTAGT |
| | 31 | AGA | | 33 | TGA |
| 101 | E53SaCas9KKH | TTTTATTCTAGTTGAAAGA | 102 | E53SaCas9KKH | TTTTTCCTTTTATTCTAGT |
| | 32 | ATT | | 33 | TGA |

TABLE 5C
(3). Exon 53 SluCas9 guides:

| Seq | Guide ID or | |
|---|---|---|
| ID No. | Guide RNA Name | Guide Sequence |
| 270 | E53Slu2 | CCTTGGTTTCTGTGATTTTCTT |
| 271 | E53Slu3 | CTTTTGGATTGCATCTACTGTA |
| 272 | E53Slu4 | TTTTGGATTGCATCTACTGTAT |
| 273 | E53Slu5 | ACCCTCCTTCCATGACTCAAGC |
| 274 | E53Slu6 | CTTCCATGACTCAAGCTTGGCT |
| 275 | E53Slu7 | ACATTTCATTCAACTGTTGCCT |
| 276 | E53Slu8 | TCAACTGTTGCCTCCGGTTCTG |
| 277 | E53Slu10 | CCAAAAGAAAATCACAGAAACC |
| 278 | E53Slu11 | GCCAAGCTTGAGTCATGGAAGG |
| 279 | E53Slu12 | AGCCAAGCTTGAGTCATGGAAG |
| 280 | E53Slu13 | CAGAGCCAAGCTTGAGTCATGG |
| 281 | E53Slu14 | AGGCCAGAGCCAAGCTTGAGTC |
| 282 | E53Slu15 | AGAAGCTGAGCAGGTCTTAGGA |
| 283 | E53Slu16 | AAGGAAGAAGCTGAGCAGGTCT |
| 284 | E53Slu17 | GGAAGCTAAGGAAGAAGCTGAG |
| 285 | E53Slu18 | TTCAACACAATGGCTGGAAGCT |
| 286 | E53Slu19 | GTTAAAGGATTCAACACAATGG |
| 287 | E53Slu20 | AAATGTTAAAGGATTCAACACA |
| 288 | E53Slu21 | GCAACAGTTGAATGAAATGTTA |
| 289 | E53Slu22 | TACAAGAACACCTTCAGAACCG |
| 290 | E53Slu23 | AAGTACAAGAACACCTTCAGAA |
| 291 | E53Slu24 | AGTTGAAAGAATTCAGAATCAG |
| 292 | E53Slu25 | TAGTTGAAAGAATTCAGAATCA |
| 924 | E53SL3.1A-Cv5 | CATTTGGATTGCATCTACTGTA |
| 925 | E53SL3.1C-Cv5 | CCTTTGGATTGCATCTACTGTA |
| 926 | E53S13.1G-Cv5 | CGTTTGGATTGCATCTACTGTA |
| 927 | E53S13.2A-Cv5 | CTATTGGATTGCATCTACTGTA |
| 928 | E53S13.2C-Cv5 | CTCTTGGATTGCATCTACTGTA |
| 929 | E53S13.2G-Cv5 | CTGTTGGATTGCATCTACTGTA |
| 930 | E53S13.3A-Cv5 | CTTATGGATTGCATCTACTGTA |
| 931 | E53S13.3C-Cv5 | CTTCTGGATTGCATCTACTGTA |
| 932 | E53S13.3G-Cv5 | CTTGTGGATTGCATCTACTGTA |
| 933 | E53S13.4A-Cv5 | CTTTAGGATTGCATCTACTGTA |
| 934 | E53S13.4C-Cv5 | CTTTCGGATTGCATCTACTGTA |
| 935 | E53S13.4G-Cv5 | CTTTGGGATTGCATCTACTGTA |
| 936 | E53S13.del2-Cv5 | TTTGGATTGCATCTACTGTA |
| 937 | E53S13.delT-Cv5 | CTTTGGATTGCATCTACTGTA |
| 938 | E53S13.delT + A.- | ACTTTGGATTGCATCTACTGTA |
| | Cv5 | |
| 950 | E53SL3-21 | TTTTGGATTGCATCTACTGTA |
| 951 | E53SL3-20 | TTTGGATTGCATCTACTGTA |
| 952 | E53SL3-19 | TTGGATTGCATCTACTGTA |
| 953 | E53SL3-18 | TGGATTGCATCTACTGTA |
| 954 | E53SL3-17 | GGATTGCATCTACTGTA |
| 955 | E53SL3-16 | GATTGCATCTACTGTA |

TABLE 5D
(4). Exon 53 SluCas9 pairs:

| Guide 1 | | | Guide 2 | | |
|---|---|---|---|---|---|
| Seq ID | | | Seq ID | | |
| No. | Guide 1 | Guide 1 Sequence | No. | Guide 2 | Guide 2 Sequence |
| 270 | E53SL2 | CCTTGGTTTCTGTGATTTT | 271 | E53SL3 | CTTTTGGATTGCATCTACT |
| | | CTT | | | GTA |
| 270 | E53SL2 | CCTTGGTTTCTGTGATTTT | 272 | E53SL4 | TTTTGGATTGCATCTACTG |
| | | CTT | | | TAT |
| 270 | E53SL2 | CCTTGGTTTCTGTGATTTT | 273 | E53SL5 | ACCCTCCTTCCATGACTCA |
| | | CTT | | | AGC |
| 270 | E53SL2 | CCTTGGTTTCTGTGATTTT | 274 | E53SL6 | CTTCCATGACTCAAGCTTG |
| | | CTT | | | GCT |
| 270 | E53SL2 | CCTTGGTTTCTGTGATTTT | 275 | E53SL7 | ACATTTCATTCAACTGTTG |
| | | CTT | | | CCT |
| 270 | E53SL2 | CCTTGGTTTCTGTGATTTT | 276 | E53SL8 | TCAACTGTTGCCTCCGGTT |
| | | CTT | | | CTG |
| 270 | E53SL2 | CCTTGGTTTCTGTGATTTT | 277 | E53SL10 | CCAAAAGAAAATCACAGAA |
| | | CTT | | | ACC |
| 270 | E53SL2 | CCTTGGTTTCTGTGATTTT | 278 | E53SL1 | GCCAAGCTTGAGTCATGGA |
| | | CTT | | 1 | AGG |
| 270 | E53SL2 | CCTTGGTTTCTGTGATTTT | 279 | E53SL1 | AGCCAAGCTTGAGTCATGG |
| | | CTT | | 2 | AAG |
| 270 | E53SL2 | CCTTGGTTTCTGTGATTTT | 280 | E53SL1 | CAGAGCCAAGCTTGAGTCA |
| | | CTT | | 3 | TGG |
| 270 | E53SL2 | CCTTGGTTTCTGTGATTTT | 281 | E53SL1 | AGGCCAGAGCCAAGCTTGA |
| | | CTT | | 4 | GTC |
| 270 | E53SL2 | CCTTGGTTTCTGTGATTTT | 282 | E53SL1 | AGAAGCTGAGCAGGTCTTA |
| | | CTT | | 5 | GGA |
| 270 | E53SL2 | CCTTGGTTTCTGTGATTTT | 283 | E53SL1 | AAGGAAGAAGCTGAGCAGG |
| | | CTT | | 6 | TCT |
| 270 | E53SL2 | CCTTGGTTTCTGTGATTTT | 284 | E53SL1 | GGAAGCTAAGGAAGAAGCT |
| | | CTT | | 7 | GAG |
| 270 | E53SL2 | CCTTGGTTTCTGTGATTTT | 285 | E53SL1 | TTCAACACAATGGCTGGAA |
| | | CTT | | 8 | GCT |
| 270 | E53SL2 | CCTTGGTTTCTGTGATTTT | 286 | E53SL1 | GTTAAAGGATTCAACACAA |
| | | CTT | | 9 | TGG |
| 270 | E53SL2 | CCTTGGTTTCTGTGATTTT | 287 | E53SL2 | AAATGTTAAAGGATTCAAC |
| | | CTT | | 0 | ACA |
| 270 | E53SL2 | CCTTGGTTTCTGTGATTTT | 288 | E53SL2 | GCAACAGTTGAATGAAATG |
| | | CTT | | 1 | TTA |
| 270 | E53SL2 | CCTTGGTTTCTGTGATTTT | 289 | E53SL2 | TACAAGAACACCTTCAGAA |
| | | CTT | | 2 | CCG |
| 270 | E53SL2 | CCTTGGTTTCTGTGATTTT | 290 | E53SL2 | AAGTACAAGAACACCTTCA |
| | | CTT | | 3 | GAA |
| 270 | E53SL2 | CCTTGGTTTCTGTGATTTT | 291 | E53SL2 | AGTTGAAAGAATTCAGAAT |
| | | CTT | | 4 | CAG |
| 270 | E53SL2 | CCTTGGTTTCTGTGATTTT | 292 | E53SL2 | TAGTTGAAAGAATTCAGAA |
| | | CTT | | 5 | TCA |
| 271 | E53SL3 | CTTTTGGATTGCATCTACT | 272 | E53SL4 | TTTTGGATTGCATCTACTG |
| | | GTA | | | TAT |
| 271 | E53SL3 | CTTTTGGATTGCATCTACT | 273 | E53SL5 | ACCCTCCTTCCATGACTCA |
| | | GTA | | | AGC |
| 271 | E53SL3 | CTTTTGGATTGCATCTACT | 274 | E53SL6 | CTTCCATGACTCAAGCTTG |
| | | GTA | | | GCT |
| 271 | E53SL3 | CTTTTGGATTGCATCTACT | 275 | E53SL7 | ACATTTCATTCAACTGTTG |
| | | GTA | | | CCT |
| 271 | E53SL3 | CTTTTGGATTGCATCTACT | 276 | E53SL8 | TCAACTGTTGCCTCCGGTT |
| | | GTA | | | CTG |
| 271 | E53SL3 | CTTTTGGATTGCATCTACT | 277 | E53SL1 | CCAAAAGAAAATCACAGAA |
| | | GTA | | 0 | ACC |
| 271 | E53SL3 | CTTTTGGATTGCATCTACT | 278 | E53SL1 | GCCAAGCTTGAGTCATGGA |
| | | GTA | | 1 | AGG |
| 271 | E53SL3 | CTTTTGGATTGCATCTACT | 279 | E53SL1 | AGCCAAGCTTGAGTCATGG |
| | | GTA | | 2 | AAG |
| 271 | E53SL3 | CTTTTGGATTGCATCTACT | 280 | E53SL1 | CAGAGCCAAGCTTGAGTCA |
| | | GTA | | 3 | TGG |
| 271 | E53SL3 | CTTTTGGATTGCATCTACT | 281 | E53SL1 | AGGCCAGAGCCAAGCTTGA |
| | | GTA | | 4 | GTC |
| 271 | E53SL3 | CTTTTGGATTGCATCTACT | 282 | E53SL1 | AGAAGCTGAGCAGGTCTTA |
| | | GTA | | 5 | GGA |
| 271 | E53SL3 | CTTTTGGATTGCATCTACT | 283 | E53SL1 | AAGGAAGAAGCTGAGCAGG |
| | | GTA | | 6 | TCT |
| 271 | E53SL3 | CTTTTGGATTGCATCTACT | 284 | E53SL1 | GGAAGCTAAGGAAGAAGCT |
| | | GTA | | 7 | GAG |
| 271 | E53SL3 | CTTTTGGATTGCATCTACT | 285 | E53SL1 | TTCAACACAATGGCTGGAA |
| | | GTA | | 8 | GCT |
| 271 | E53SL3 | CTTTTGGATTGCATCTACT | 286 | E53SL1 | GTTAAAGGATTCAACACAA |
| | | GTA | | 9 | TGG |
| 271 | E53SL3 | CTTTTGGATTGCATCTACT | 287 | E53SL2 | AAATGTTAAAGGATTCAAC |
| | | GTA | | 0 | ACA |
| 271 | E53SL3 | CTTTTGGATTGCATCTACT | 288 | E53SL2 | GCAACAGTTGAATGAAATG |
| | | GTA | | 1 | TTA |
| 271 | E53SL3 | CTTTTGGATTGCATCTACT | 289 | E53SL2 | TACAAGAACACCTTCAGAA |
| | | GTA | | 2 | CCG |
| 271 | E53SL3 | CTTTTGGATTGCATCTACT | 290 | E53SL2 | AAGTACAAGAACACCTTCA |
| | | GTA | | 3 | GAA |
| 271 | E53SL3 | CTTTTGGATTGCATCTACT | 291 | E53SL2 | AGTTGAAAGAATTCAGAAT |
| | | GTA | | 4 | CAG |
| 271 | E53SL3 | CTTTTGGATTGCATCTACT | 292 | E53SL2 | TAGTTGAAAGAATTCAGAA |
| | | GTA | | 5 | TCA |
| 272 | E53SL4 | TTTTGGATTGCATCTACTG | 273 | E53SL5 | ACCCTCCTTCCATGACTCA |
| | | TAT | | | AGC |
| 272 | E53SL4 | TTTTGGATTGCATCTACTG | 274 | E53SL6 | CTTCCATGACTCAAGCTTG |
| | | TAT | | | GCT |
| 272 | E53SL4 | TTTTGGATTGCATCTACTG | 275 | E53SL7 | ACATTTCATTCAACTGTTG |
| | | TAT | | | CCT |
| 272 | E53SL4 | TTTTGGATTGCATCTACTG | 276 | E53SL8 | TCAACTGTTGCCTCCGGTT |
| | | TAT | | | CTG |
| 272 | E53SL4 | TTTTGGATTGCATCTACTG | 277 | E53SL1 | CCAAAAGAAAATCACAGAA |
| | | TAT | | 0 | ACC |
| 272 | E53SL4 | TTTTGGATTGCATCTACTG | 278 | E53SL1 | GCCAAGCTTGAGTCATGGA |
| | | TAT | | 1 | AGG |
| 272 | E53SL4 | TTTTGGATTGCATCTACTG | 279 | E53SL1 | AGCCAAGCTTGAGTCATGG |
| | | TAT | | 2 | AAG |
| 272 | E53SL4 | TTTTGGATTGCATCTACTG | 280 | E53SL1 | CAGAGCCAAGCTTGAGTCA |
| | | TAT | | 3 | TGG |
| 272 | E53SL4 | TTTTGGATTGCATCTACTG | 281 | E53SL1 | AGGCCAGAGCCAAGCTTGA |
| | | TAT | | 4 | GTC |
| 272 | E53SL4 | TTTTGGATTGCATCTACTG | 282 | E53SL1 | AGAAGCTGAGCAGGTCTTA |
| | | TAT | | 5 | GGA |
| 272 | E53SL4 | TTTTGGATTGCATCTACTG | 283 | E53SL1 | AAGGAAGAAGCTGAGCAGG |
| | | TAT | | 6 | TCT |
| 272 | E53SL4 | TTTTGGATTGCATCTACTG | 284 | E53SL1 | GGAAGCTAAGGAAGAAGCT |
| | | TAT | | 7 | GAG |
| 272 | E53SL4 | TTTTGGATTGCATCTACTG | 285 | E53SL1 | TTCAACACAATGGCTGGAA |
| | | TAT | | 8 | GCT |
| 272 | E53SL4 | TTTTGGATTGCATCTACTG | 286 | E53SL1 | GTTAAAGGATTCAACACAA |
| | | TAT | | 9 | TGG |
| 272 | E53SL4 | TTTTGGATTGCATCTACTG | 287 | E53SL2 | AAATGTTAAAGGATTCAAC |
| | | TAT | | 0 | ACA |
| 272 | E53SL4 | TTTTGGATTGCATCTACTG | 288 | E53SL2 | GCAACAGTTGAATGAAATG |
| | | TAT | | 1 | TTA |
| 272 | E53SL4 | TTTTGGATTGCATCTACTG | 289 | E53SL2 | TACAAGAACACCTTCAGAA |
| | | TAT | | 2 | CCG |
| 272 | E53SL4 | TTTTGGATTGCATCTACTG | 290 | E53SL2 | AAGTACAAGAACACCTTCA |
| | | TAT | | 3 | GAA |
| 272 | E53SL4 | TTTTGGATTGCATCTACTG | 291 | E53SL2 | AGTTGAAAGAATTCAGAAT |
| | | TAT | | 4 | CAG |
| 272 | E53SL4 | TTTTGGATTGCATCTACTG | 292 | E53SL2 | TAGTTGAAAGAATTCAGAA |
| | | TAT | | 5 | TCA |
| 273 | E53SL5 | ACCCTCCTTCCATGACTCA | 274 | E53SL6 | CTTCCATGACTCAAGCTTG |
| | | AGC | | | GCT |
| 273 | E53SL5 | ACCCTCCTTCCATGACTCA | 275 | E53SL7 | ACATTTCATTCAACTGTTG |
| | | AGC | | | CCT |
| 273 | E53SL5 | ACCCTCCTTCCATGACTCA | 276 | E53SL8 | TCAACTGTTGCCTCCGGTT |
| | | AGC | | | CTG |
| 273 | E53SL5 | ACCCTCCTTCCATGACTCA | 277 | E53SL1 | CCAAAAGAAAATCACAGAA |
| | | AGC | | 0 | ACC |
| 273 | E53SL5 | ACCCTCCTTCCATGACTCA | 278 | E53SL1 | GCCAAGCTTGAGTCATGGA |
| | | AGC | | 1 | AGG |
| 273 | E53SL5 | ACCCTCCTTCCATGACTCA | 279 | E53SL1 | AGCCAAGCTTGAGTCATGG |
| | | AGC | | 2 | AAG |
| 273 | E53SL5 | ACCCTCCTTCCATGACTCA | 280 | E53SL1 | CAGAGCCAAGCTTGAGTCA |
| | | AGC | | 3 | TGG |
| 273 | E53SL5 | ACCCTCCTTCCATGACTCA | 281 | E53SL1 | AGGCCAGAGCCAAGCTTGA |
| | | AGC | | 1 | GTC |
| 273 | E53SL5 | ACCCTCCTTCCATGACTCA | 282 | E53SL1 | AGAAGCTGAGCAGGTCTTA |
| | | AGC | | 5 | GGA |
| 273 | E53SL5 | ACCCTCCTTCCATGACTCA | 283 | E53SL1 | AAGGAAGAAGCTGAGCAGG |
| | | AGC | | 6 | TCT |
| 273 | E53SL5 | ACCCTCCTTCCATGACTCA | 284 | E53SL1 | GGAAGCTAAGGAAGAAGCT |
| | | AGC | | 7 | GAG |
| 273 | E53SL5 | ACCCTCCTTCCATGACTCA | 285 | E53SL1 | TTCAACACAATGGCTGGAA |
| | | AGC | | 8 | GCT |
| 273 | E53SL5 | ACCCTCCTTCCATGACTCA | 286 | E53SL1 | GTTAAAGGATTCAACACAA |
| | | AGC | | 9 | TGG |
| 273 | E53SL5 | ACCCTCCTTCCATGACTCA | 287 | E53SL2 | AAATGTTAAAGGATTCAAC |
| | | AGC | | 0 | ACA |
| 273 | E53SL5 | ACCCTCCTTCCATGACTCA | 288 | E53SL2 | GCAACAGTTGAATGAAATG |
| | | AGC | | 1 | TTA |
| 273 | E53SL5 | ACCCTCCTTCCATGACTCA | 289 | E53SL2 | TACAAGAACACCTTCAGAA |
| | | AGC | | 2 | CCG |
| 273 | E53SL5 | ACCCTCCTTCCATGACTCA | 290 | E53SL2 | AAGTACAAGAACACCTTCA |
| | | AGC | | 3 | GAA |
| 273 | E53SL5 | ACCCTCCTTCCATGACTCA | 291 | E53SL2 | AGTTGAAAGAATTCAGAAT |
| | | AGC | | 4 | CAG |
| 273 | E53SL5 | ACCCTCCTTCCATGACTCA | 292 | E53SL2 | TAGTTGAAAGAATTCAGAA |
| | | AGC | | 5 | TCA |
| 274 | E53SL6 | CTTCCATGACTCAAGCTTG | 275 | E53SL7 | ACATTTCATTCAACTGTTG |
| | | GCT | | | CCT |
| 274 | E53SL6 | CTTCCATGACTCAAGCTTG | 276 | E53SL8 | TCAACTGTTGCCTCCGGTT |
| | | GCT | | | CTG |
| 274 | E53SL6 | CTTCCATGACTCAAGCTTG | 277 | E53SL1 | CCAAAAGAAAATCACAGAA |
| | | GCT | | 0 | ACC |
| 274 | E53SL6 | CTTCCATGACTCAAGCTTG | 278 | E53SL1 | GCCAAGCTTGAGTCATGGA |
| | | GCT | | 1 | AGG |
| 274 | E53SL6 | CTTCCATGACTCAAGCTTG | 279 | E53SL1 | AGCCAAGCTTGAGTCATGG |
| | | GCT | | 2 | AAG |
| 274 | E53SL6 | CTTCCATGACTCAAGCTTG | 280 | E53SL1 | CAGAGCCAAGCTTGAGTCA |
| | | GCT | | 3 | TGG |
| 274 | E53SL6 | CTTCCATGACTCAAGCTTG | 281 | E53SL1 | AGGCCAGAGCCAAGCTTGA |
| | | GCT | | 4 | GTC |
| 274 | E53SL6 | CTTCCATGACTCAAGCTTG | 282 | E53SL1 | AGAAGCTGAGCAGGTCTTA |
| | | GCT | | 5 | GGA |
| 274 | E53SL6 | CTTCCATGACTCAAGCTTG | 283 | E53SL1 | AAGGAAGAAGCTGAGCAGG |
| | | GCT | | 6 | TCT |
| 274 | E53SL6 | CTTCCATGACTCAAGCTTG | 284 | E53SL1 | GGAAGCTAAGGAAGAAGCT |
| | | GCT | | 7 | GAG |
| 274 | E53SL6 | CTTCCATGACTCAAGCTTG | 285 | E53SL1 | TTCAACACAATGGCTGGAA |
| | | GCT | | 8 | GCT |
| 274 | E53SL6 | CTTCCATGACTCAAGCTTG | 286 | E53SL1 | GTTAAAGGATTCAACACAA |
| | | GCT | | 9 | TGG |
| 274 | E53SL6 | CTTCCATGACTCAAGCTTG | 287 | E53SL2 | AAATGTTAAAGGATTCAAC |
| | | GCT | | 0 | ACA |
| 274 | E53SL6 | CTTCCATGACTCAAGCTTG | 288 | E53SL2 | GCAACAGTTGAATGAAATG |
| | | GCT | | 1 | TTA |
| 274 | E53SL6 | CTTCCATGACTCAAGCTTG | 289 | E53SL2 | TACAAGAACACCTTCAGAA |
| | | GCT | | 2 | CCG |
| 274 | E53SL6 | CTTCCATGACTCAAGCTTG | 290 | E53SL2 | AAGTACAAGAACACCTTCA |
| | | GCT | | 3 | GAA |
| 274 | E53SL6 | CTTCCATGACTCAAGCTTG | 291 | E53SL2 | AGTTGAAAGAATTCAGAAT |
| | | GCT | | 4 | CAG |
| 274 | E53SL6 | CTTCCATGACTCAAGCTTG | 292 | E53SL2 | TAGTTGAAAGAATTCAGAA |
| | | GCT | | 5 | TCA |
| 275 | E53SL7 | ACATTTCATTCAACTGTTG | 276 | E53SL8 | TCAACTGTTGCCTCCGGTT |
| | | CCT | | | CTG |
| 275 | E53SL7 | ACATTTCATTCAACTGTTG | 277 | E53SL1 | CCAAAAGAAAATCACAGAA |
| | | CCT | | 0 | ACC |
| 275 | E53SL7 | ACATTTCATTCAACTGTTG | 278 | E53SL1 | GCCAAGCTTGAGTCATGGA |
| | | CCT | | 1 | AGG |
| 275 | E53SL7 | ACATTTCATTCAACTGTTG | 279 | E53SL1 | AGCCAAGCTTGAGTCATGG |
| | | CCT | | 2 | AAG |
| 275 | E53SL7 | ACATTTCATTCAACTGTTG | 280 | E53SL1 | CAGAGCCAAGCTTGAGTCA |
| | | CCT | | 3 | TGG |
| 275 | E53SL7 | ACATTTCATTCAACTGTTG | 281 | E53SL1 | AGGCCAGAGCCAAGCTTGA |
| | | CCT | | 4 | GTC |
| 275 | E53SL7 | ACATTTCATTCAACTGTTG | 282 | E53SL1 | AGAAGCTGAGCAGGTCTTA |
| | | CCT | | 5 | GGA |
| 275 | E53SL7 | ACATTTCATTCAACTGTTG | 283 | E53SL1 | AAGGAAGAAGCTGAGCAGG |
| | | CCT | | 6 | TCT |
| 275 | E53SL7 | ACATTTCATTCAACTGTTG | 284 | E53SL1 | GGAAGCTAAGGAAGAAGCT |
| | | CCT | | 7 | GAG |
| 275 | E53SL7 | ACATTTCATTCAACTGTTG | 285 | E53SL1 | TTCAACACAATGGCTGGAA |
| | | CCT | | 8 | GCT |
| 275 | E53SL7 | ACATTTCATTCAACTGTTG | 286 | E53SL1 | GTTAAAGGATTCAACACAA |
| | | CCT | | 9 | TGG |
| 275 | E53SL7 | ACATTTCATTCAACTGTTG | 287 | E53SL2 | AAATGTTAAAGGATTCAAC |
| | | CCT | | 0 | ACA |
| 275 | E53SL7 | ACATTTCATTCAACTGTTG | 288 | E53SL2 | GCAACAGTTGAATGAAATG |
| | | CCT | | 1 | TTA |
| 275 | E53SL7 | ACATTTCATTCAACTGTTG | 289 | E53SL2 | TACAAGAACACCTTCAGAA |
| | | CCT | | 2 | CCG |
| 275 | E53SL7 | ACATTTCATTCAACTGTTG | 290 | E53SL2 | AAGTACAAGAACACCTTCA |
| | | CCT | | 3 | GAA |
| 275 | E53SL7 | ACATTTCATTCAACTGTTG | 291 | E53SL2 | AGTTGAAAGAATTCAGAAT |
| | | CCT | | 4 | CAG |
| 275 | E53SL7 | ACATTTCATTCAACTGTTG | 292 | E53SL2 | TAGTTGAAAGAATTCAGAA |
| | | CCT | | 5 | TCA |
| 276 | E53SL8 | TCAACTGTTGCCTCCGGTT | 277 | E53SL1 | CCAAAAGAAAATCACAGAA |
| | | CTG | | 0 | ACC |
| 276 | E53SL8 | TCAACTGTTGCCTCCGGTT | 278 | E53SL1 | GCCAAGCTTGAGTCATGGA |
| | | CTG | | 1 | AGG |
| 276 | E53SL8 | TCAACTGTTGCCTCCGGTT | 279 | E53SL1 | AGCCAAGCTTGAGTCATGG |
| | | CTG | | 2 | AAG |
| 276 | E53SL8 | TCAACTGTTGCCTCCGGTT | 280 | E53SL1 | CAGAGCCAAGCTTGAGTCA |
| | | CTG | | 3 | TGG |
| 276 | E53SL8 | TCAACTGTTGCCTCCGGTT | 281 | E53SL1 | AGGCCAGAGCCAAGCTTGA |
| | | CTG | | 4 | GTC |
| 276 | E53SL8 | TCAACTGTTGCCTCCGGTT | 282 | E53SL1 | AGAAGCTGAGCAGGTCTTA |
| | | CTG | | 5 | GGA |
| 276 | E53SL8 | TCAACTGTTGCCTCCGGTT | 283 | E53SL1 | AAGGAAGAAGCTGAGCAGG |
| | | CTG | | 6 | TCT |
| 276 | E53SL8 | TCAACTGTTGCCTCCGGTT | 284 | E53SL1 | GGAAGCTAAGGAAGAAGCT |
| | | CTG | | 7 | GAG |
| 276 | E53SL8 | TCAACTGTTGCCTCCGGTT | 285 | E53SL1 | TTCAACACAATGGCTGGAA |
| | | CTG | | 8 | GCT |
| 276 | E53SL8 | TCAACTGTTGCCTCCGGTT | 286 | E53SL1 | GTTAAAGGATTCAACACAA |
| | | CTG | | 9 | TGG |
| 276 | E53SL8 | TCAACTGTTGCCTCCGGTT | 287 | E53SL2 | AAATGTTAAAGGATTCAAC |
| | | CTG | | 0 | ACA |
| 276 | E53SL8 | TCAACTGTTGCCTCCGGTT | 288 | E53SL2 | GCAACAGTTGAATGAAATG |
| | | CTG | | 1 | TTA |
| 276 | E53SL8 | TCAACTGTTGCCTCCGGTT | 289 | E53SL2 | TACAAGAACACCTTCAGAA |
| | | CTG | | 2 | CCG |
| 276 | E53SL8 | TCAACTGTTGCCTCCGGTT | 290 | E53SL2 | AAGTACAAGAACACCTTCA |
| | | CTG | | 3 | GAA |
| 276 | E53SL8 | TCAACTGTTGCCTCCGGTT | 291 | E53SL2 | AGTTGAAAGAATTCAGAAT |
| | | CTG | | 4 | CAG |
| 276 | E53SL8 | TCAACTGTTGCCTCCGGTT | 292 | E53SL2 | TAGTTGAAAGAATTCAGAA |
| | | CTG | | 5 | TCA |
| 277 | E53SL10 | CCAAAAGAAAATCACAGAA | 278 | E53SL1 | GCCAAGCTTGAGTCATGGA |
| | | ACC | | 1 | AGG |
| 277 | E53SL10 | CCAAAAGAAAATCACAGAA | 279 | E53SL1 | AGCCAAGCTTGAGTCATGG |
| | | ACC | | 2 | AAG |
| 277 | E53SL10 | CCAAAAGAAAATCACAGAA | 280 | E53SL1 | CAGAGCCAAGCTTGAGTCA |
| | | ACC | | 3 | TGG |
| 277 | E53SL10 | CCAAAAGAAAATCACAGAA | 281 | E53SL1 | AGGCCAGAGCCAAGCTTGA |
| | | ACC | | 4 | GTC |
| 277 | E53SL10 | CCAAAAGAAAATCACAGAA | 282 | E53SL1 | AGAAGCTGAGCAGGTCTTA |
| | | ACC | | 5 | GGA |
| 277 | E53SL10 | CCAAAAGAAAATCACAGAA | 283 | E53SL1 | AAGGAAGAAGCTGAGCAGG |
| | | ACC | | 6 | TCT |
| 277 | E53SL10 | CCAAAAGAAAATCACAGAA | 284 | E53SL1 | GGAAGCTAAGGAAGAAGCT |
| | | ACC | | 7 | GAG |
| 277 | E53SL10 | CCAAAAGAAAATCACAGAA | 285 | E53SL1 | TTCAACACAATGGCTGGAA |
| | | ACC | | 8 | GCT |
| 277 | E53SL10 | CCAAAAGAAAATCACAGAA | 286 | E53SL1 | GTTAAAGGATTCAACACAA |
| | | ACC | | 9 | TGG |
| 277 | E53SL10 | CCAAAAGAAAATCACAGAA | 287 | E53SL2 | AAATGTTAAAGGATTCAAC |
| | | ACC | | 0 | ACA |
| 277 | E53SL10 | CCAAAAGAAAATCACAGAA | 288 | E53SL2 | GCAACAGTTGAATGAAATG |
| | | ACC | | 1 | TTA |
| 277 | E53SL10 | CCAAAAGAAAATCACAGAA | 289 | E53SL2 | TACAAGAACACCTTCAGAA |
| | | ACC | | 2 | CCG |
| 277 | E53SL10 | CCAAAAGAAAATCACAGAA | 290 | E53SL2 | AAGTACAAGAACACCTTCA |
| | | ACC | | 3 | GAA |
| 277 | E53SL10 | CCAAAAGAAAATCACAGAA | 291 | E53SL2 | AGTTGAAAGAATTCAGAAT |
| | | ACC | | 4 | CAG |
| 277 | E53SL10 | CCAAAAGAAAATCACAGAA | 292 | E53SL2 | TAGTTGAAAGAATTCAGAA |
| | | ACC | | 5 | TCA |
| 278 | E53SL11 | GCCAAGCTTGAGTCATGGA | 279 | E53SL1 | AGCCAAGCTTGAGTCATGG |
| | | AGG | | 2 | AAG |
| 278 | E53SL11 | GCCAAGCTTGAGTCATGGA | 280 | E53SL1 | CAGAGCCAAGCTTGAGTCA |
| | | AGG | | 3 | TGG |
| 278 | E53SL11 | GCCAAGCTTGAGTCATGGA | 281 | E53SL1 | AGGCCAGAGCCAAGCTTGA |
| | | AGG | | 4 | GTC |
| 278 | E53SL11 | GCCAAGCTTGAGTCATGGA | 282 | E53SL1 | AGAAGCTGAGCAGGTCTTA |
| | | AGG | | 5 | GGA |
| 278 | E53SL11 | GCCAAGCTTGAGTCATGGA | 283 | E53SL1 | AAGGAAGAAGCTGAGCAGG |
| | | AGG | | 6 | TCT |
| 278 | E53SL11 | GCCAAGCTTGAGTCATGGA | 284 | E53SL1 | GGAAGCTAAGGAAGAAGCT |
| | | AGG | | 7 | GAG |
| 278 | E53SL11 | GCCAAGCTTGAGTCATGGA | 285 | E53SL1 | TTCAACACAATGGCTGGAA |
| | | AGG | | 8 | GCT |
| 278 | E53SL11 | GCCAAGCTTGAGTCATGGA | 286 | E53SL1 | GTTAAAGGATTCAACACAA |
| | | AGG | | 9 | TGG |
| 278 | E53SL11 | GCCAAGCTTGAGTCATGGA | 287 | E53SL2 | AAATGTTAAAGGATTCAAC |
| | | AGG | | 0 | ACA |
| 278 | E53SL11 | GCCAAGCTTGAGTCATGGA | 288 | E53SL2 | GCAACAGTTGAATGAAATG |
| | | AGG | | 1 | TTA |
| 278 | E53SL11 | GCCAAGCTTGAGTCATGGA | 289 | E53SL2 | TACAAGAACACCTTCAGAA |
| | | AGG | | 2 | CCG |
| 278 | E53SL11 | GCCAAGCTTGAGTCATGGA | 290 | E53SL2 | AAGTACAAGAACACCTTCA |
| | | AGG | | 3 | GAA |
| 278 | E53SL11 | GCCAAGCTTGAGTCATGGA | 291 | E53SL2 | AGTTGAAAGAATTCAGAAT |
| | | AGG | | 4 | CAG |
| 278 | E53SL11 | GCCAAGCTTGAGTCATGGA | 292 | E53SL2 | TAGTTGAAAGAATTCAGAA |
| | | AGG | | 5 | TCA |
| 279 | E53SL12 | AGCCAAGCTTGAGTCATGG | 280 | E53SL1 | CAGAGCCAAGCTTGAGTCA |
| | | AAG | | 3 | TGG |
| 279 | E53SL12 | AGCCAAGCTTGAGTCATGG | 281 | E53SL1 | AGGCCAGAGCCAAGCTTGA |
| | | AAG | | 4 | GTC |
| 279 | E53SL12 | AGCCAAGCTTGAGTCATGG | 282 | E53SL1 | AGAAGCTGAGCAGGTCTTA |
| | | AAG | | 5 | GGA |
| 279 | E53SL12 | AGCCAAGCTTGAGTCATGG | 283 | E53SL1 | AAGGAAGAAGCTGAGCAGG |
| | | AAG | | 6 | TCT |
| 279 | E53SL12 | AGCCAAGCTTGAGTCATGG | 284 | E53SL1 | GGAAGCTAAGGAAGAAGCT |
| | | AAG | | 7 | GAG |
| 279 | E53SL12 | AGCCAAGCTTGAGTCATGG | 285 | E53SL1 | TTCAACACAATGGCTGGAA |
| | | AAG | | 8 | GCT |
| 279 | E53SL12 | AGCCAAGCTTGAGTCATGG | 286 | E53SL1 | GTTAAAGGATTCAACACAA |
| | | AAG | | 9 | TGG |
| 279 | E53SL12 | AGCCAAGCTTGAGTCATGG | 287 | E53SL2 | AAATGTTAAAGGATTCAAC |
| | | AAG | | 0 | ACA |
| 279 | E53SL12 | AGCCAAGCTTGAGTCATGG | 288 | E53SL2 | GCAACAGTTGAATGAAATG |
| | | AAG | | 1 | TTA |
| 279 | E53SL12 | AGCCAAGCTTGAGTCATGG | 289 | E53SL2 | TACAAGAACACCTTCAGAA |
| | | AAG | | 2 | CCG |
| 279 | E53SL12 | AGCCAAGCTTGAGTCATGG | 290 | E53SL2 | AAGTACAAGAACACCTTCA |
| | | AAG | | 3 | GAA |
| 279 | E53SL12 | AGCCAAGCTTGAGTCATGG | 291 | E53SL2 | AGTTGAAAGAATTCAGAAT |
| | | AAG | | 4 | CAG |
| 279 | E53SL12 | AGCCAAGCTTGAGTCATGG | 292 | E53SL2 | TAGTTGAAAGAATTCAGAA |
| | | AAG | | 5 | TCA |
| 280 | E53SL13 | CAGAGCCAAGCTTGAGTCA | 281 | E53SL1 | AGGCCAGAGCCAAGCTTGA |
| | | TGG | | 4 | GTC |
| 280 | E53SL13 | CAGAGCCAAGCTTGAGTCA | 282 | E53SL1 | AGAAGCTGAGCAGGTCTTA |
| | | TGG | | 5 | GGA |
| 280 | E53SL13 | CAGAGCCAAGCTTGAGTCA | 283 | E53SL1 | AAGGAAGAAGCTGAGCAGG |
| | | TGG | | 6 | TCT |
| 280 | E53SL13 | CAGAGCCAAGCTTGAGTCA | 284 | E53SL1 | GGAAGCTAAGGAAGAAGCT |
| | | TGG | | 7 | GAG |
| 280 | E53SL13 | CAGAGCCAAGCTTGAGTCA | 285 | E53SL1 | TTCAACACAATGGCTGGAA |
| | | TGG | | 8 | GCT |
| 280 | E53SL13 | CAGAGCCAAGCTTGAGTCA | 286 | E53SL1 | GTTAAAGGATTCAACACAA |
| | | TGG | | 9 | TGG |
| 280 | E53SL13 | CAGAGCCAAGCTTGAGTCA | 287 | E53SL2 | AAATGTTAAAGGATTCAAC |
| | | TGG | | 0 | ACA |
| 280 | E53SL13 | CAGAGCCAAGCTTGAGTCA | 288 | E53SL2 | GCAACAGTTGAATGAAATG |
| | | TGG | | 1 | TTA |
| 280 | E53SL13 | CAGAGCCAAGCTTGAGTCA | 289 | E53SL2 | TACAAGAACACCTTCAGAA |
| | | TGG | | 2 | CCG |
| 280 | E53SL13 | CAGAGCCAAGCTTGAGTCA | 290 | E53SL2 | AAGTACAAGAACACCTTCA |
| | | TGG | | 3 | GAA |
| 280 | E53SL13 | CAGAGCCAAGCTTGAGTCA | 291 | E53SL2 | AGTTGAAAGAATTCAGAAT |
| | | TGG | | 4 | CAG |
| 280 | E53SL13 | CAGAGCCAAGCTTGAGTCA | 292 | E53SL2 | TAGTTGAAAGAATTCAGAA |
| | | TGG | | 5 | TCA |
| 281 | E53SL14 | AGGCCAGAGCCAAGCTTGA | 282 | E53SL1 | AGAAGCTGAGCAGGTCTTA |
| | | GTC | | 5 | GGA |
| 281 | E53SL14 | AGGCCAGAGCCAAGCTTGA | 283 | E53SL1 | AAGGAAGAAGCTGAGCAGG |
| | | GTC | | 6 | TCT |
| 281 | E53SL14 | AGGCCAGAGCCAAGCTTGA | 284 | E53SL1 | GGAAGCTAAGGAAGAAGCT |
| | | GTC | | 7 | GAG |
| 281 | E53SL14 | AGGCCAGAGCCAAGCTTGA | 285 | E53SL1 | TTCAACACAATGGCTGGAA |
| | | GTC | | 8 | GCT |
| 281 | E53SL14 | AGGCCAGAGCCAAGCTTGA | 286 | E53SL1 | GTTAAAGGATTCAACACAA |
| | | GTC | | 9 | TGG |
| 281 | E53SL14 | AGGCCAGAGCCAAGCTTGA | 287 | E53SL2 | AAATGTTAAAGGATTCAAC |
| | | GTC | | 0 | ACA |
| 281 | E53SL14 | AGGCCAGAGCCAAGCTTGA | 288 | E53SL2 | GCAACAGTTGAATGAAATG |
| | | GTC | | 1 | TTA |
| 281 | E53SL14 | AGGCCAGAGCCAAGCTTGA | 289 | E53SL2 | TACAAGAACACCTTCAGAA |
| | | GTC | | 2 | CCG |
| 281 | E53SL14 | AGGCCAGAGCCAAGCTTGA | 290 | E53SL2 | AAGTACAAGAACACCTTCA |
| | | GTC | | 3 | GAA |
| 281 | E53SL14 | AGGCCAGAGCCAAGCTTGA | 291 | E53SL2 | AGTTGAAAGAATTCAGAAT |
| | | GTC | | 4 | CAG |
| 281 | E53SL14 | AGGCCAGAGCCAAGCTTGA | 292 | E53SL2 | TAGTTGAAAGAATTCAGAA |
| | | GTC | | 5 | TCA |
| 282 | E53SL15 | AGAAGCTGAGCAGGTCTTA | 283 | E53SL1 | AAGGAAGAAGCTGAGCAGG |
| | | GGA | | 6 | TCT |
| 282 | E53SL15 | AGAAGCTGAGCAGGTCTTA | 284 | E53SL1 | GGAAGCTAAGGAAGAAGCT |
| | | GGA | | 7 | GAG |
| 282 | E53SL15 | AGAAGCTGAGCAGGTCTTA | 285 | E53SL1 | TTCAACACAATGGCTGGAA |
| | | GGA | | 8 | GCT |
| 282 | E53SL15 | AGAAGCTGAGCAGGTCTTA | 286 | E53SL1 | GTTAAAGGATTCAACACAA |
| | | GGA | | 9 | TGG |
| 282 | E53SL15 | AGAAGCTGAGCAGGTCTTA | 287 | E53SL2 | AAATGTTAAAGGATTCAAC |
| | | GGA | | 0 | ACA |
| 282 | E53SL15 | AGAAGCTGAGCAGGTCTTA | 288 | E53SL2 | GCAACAGTTGAATGAAATG |
| | | GGA | | 1 | TTA |
| 282 | E53SL15 | AGAAGCTGAGCAGGTCTTA | 289 | E53SL2 | TACAAGAACACCTTCAGAA |
| | | GGA | | 2 | CCG |
| 282 | E53SL15 | AGAAGCTGAGCAGGTCTTA | 290 | E53SL2 | AAGTACAAGAACACCTTCA |
| | | GGA | | 3 | GAA |
| 282 | E53SL15 | AGAAGCTGAGCAGGTCTTA | 291 | E53SL2 | AGTTGAAAGAATTCAGAAT |
| | | GGA | | 4 | CAG |
| 282 | E53SL15 | AGAAGCTGAGCAGGTCTTA | 292 | E53SL2 | TAGTTGAAAGAATTCAGAA |
| | | GGA | | 5 | TCA |
| 283 | E53SL16 | AAGGAAGAAGCTGAGCAGG | 284 | E53SL1 | GGAAGCTAAGGAAGAAGCT |
| | | TCT | | 7 | GAG |
| 283 | E53SL16 | AAGGAAGAAGCTGAGCAGG | 285 | E53SL1 | TTCAACACAATGGCTGGAA |
| | | TCT | | 8 | GCT |
| 283 | E53SL16 | AAGGAAGAAGCTGAGCAGG | 286 | E53SL1 | GTTAAAGGATTCAACACAA |
| | | TCT | | 9 | TGG |
| 283 | E53SL16 | AAGGAAGAAGCTGAGCAGG | 287 | E53SL2 | AAATGTTAAAGGATTCAAC |
| | | TCT | | 0 | ACA |
| 283 | E53SL16 | AAGGAAGAAGCTGAGCAGG | 288 | E53SL2 | GCAACAGTTGAATGAAATG |
| | | TCT | | 1 | TTA |
| 283 | E53SL16 | AAGGAAGAAGCTGAGCAGG | 289 | E53SL2 | TACAAGAACACCTTCAGAA |
| | | TCT | | 2 | CCG |
| 283 | E53SL16 | AAGGAAGAAGCTGAGCAGG | 290 | E53SL2 | AAGTACAAGAACACCTTCA |
| | | TCT | | 3 | GAA |
| 283 | E53SL16 | AAGGAAGAAGCTGAGCAGG | 291 | E53SL2 | AGTTGAAAGAATTCAGAAT |
| | | TCT | | 4 | CAG |
| 283 | E53SL16 | AAGGAAGAAGCTGAGCAGG | 292 | E53SL2 | TAGTTGAAAGAATTCAGAA |
| | | TCT | | 5 | TCA |
| 284 | E53SL17 | GGAAGCTAAGGAAGAAGCT | 285 | E53SL1 | TTCAACACAATGGCTGGAA |
| | | GAG | | 8 | GCT |
| 284 | E53SL17 | GGAAGCTAAGGAAGAAGCT | 286 | E53SL1 | GTTAAAGGATTCAACACAA |
| | | GAG | | 9 | TGG |
| 284 | E53SL17 | GGAAGCTAAGGAAGAAGCT | 287 | E53SL2 | AAATGTTAAAGGATTCAAC |
| | | GAG | | 0 | ACA |
| 284 | E53SL17 | GGAAGCTAAGGAAGAAGCT | 288 | E53SL2 | GCAACAGTTGAATGAAATG |
| | | GAG | | 1 | TTA |
| 284 | E53SL17 | GGAAGCTAAGGAAGAAGCT | 289 | E53SL2 | TACAAGAACACCTTCAGAA |
| | | GAG | | 2 | CCG |
| 284 | E53SL17 | GGAAGCTAAGGAAGAAGCT | 290 | E53SL2 | AAGTACAAGAACACCTTCA |
| | | GAG | | 3 | GAA |
| 284 | E53SL17 | GGAAGCTAAGGAAGAAGCT | 291 | E53SL2 | AGTTGAAAGAATTCAGAAT |
| | | GAG | | 4 | CAG |
| 284 | E53SL17 | GGAAGCTAAGGAAGAAGCT | 292 | E53SL2 | TAGTTGAAAGAATTCAGAA |
| | | GAG | | 5 | TCA |
| 285 | E53SL18 | TTCAACACAATGGCTGGAA | 286 | E53SL1 | GTTAAAGGATTCAACACAA |
| | | GCT | | 9 | TGG |
| 285 | E53SL18 | TTCAACACAATGGCTGGAA | 287 | E53SL2 | AAATGTTAAAGGATTCAAC |
| | | GCT | | 0 | ACA |
| 285 | E53SL18 | TTCAACACAATGGCTGGAA | 288 | E53SL2 | GCAACAGTTGAATGAAATG |
| | | GCT | | 1 | TTA |
| 285 | E53SL18 | TTCAACACAATGGCTGGAA | 289 | E53SL2 | TACAAGAACACCTTCAGAA |
| | | GCT | | 2 | CCG |
| 285 | E53SL18 | TTCAACACAATGGCTGGAA | 290 | E53SL2 | AAGTACAAGAACACCTTCA |
| | | GCT | | 3 | GAA |
| 285 | E53SL18 | TTCAACACAATGGCTGGAA | 291 | E53SL2 | AGTTGAAAGAATTCAGAAT |
| | | GCT | | 4 | CAG |
| 285 | E53SL18 | TTCAACACAATGGCTGGAA | 292 | E53SL2 | TAGTTGAAAGAATTCAGAA |
| | | GCT | | 5 | TCA |
| 286 | E53SL19 | GTTAAAGGATTCAACACAA | 287 | E53SL2 | AAATGTTAAAGGATTCAAC |
| | | TGG | | 0 | ACA |
| 286 | E53SL19 | GTTAAAGGATTCAACACAA | 288 | E53SL2 | GCAACAGTTGAATGAAATG |
| | | TGG | | 1 | TTA |
| 286 | E53SL19 | GTTAAAGGATTCAACACAA | 289 | E53SL2 | TACAAGAACACCTTCAGAA |
| | | TGG | | 2 | CCG |
| 286 | E53SL19 | GTTAAAGGATTCAACACAA | 290 | E53SL2 | AAGTACAAGAACACCTTCA |
| | | TGG | | 3 | GAA |
| 286 | E53SL19 | GTTAAAGGATTCAACACAA | 291 | E53SL2 | AGTTGAAAGAATTCAGAAT |
| | | TGG | | 4 | CAG |
| 286 | E53SL19 | GTTAAAGGATTCAACACAA | 292 | E53SL2 | TAGTTGAAAGAATTCAGAA |
| | | TGG | | 5 | TCA |
| 287 | E53SL20 | AAATGTTAAAGGATTCAAC | 288 | E53SL2 | GCAACAGTTGAATGAAATG |
| | | ACA | | 1 | TTA |
| 287 | E53SL20 | AAATGTTAAAGGATTCAAC | 289 | E53SL2 | TACAAGAACACCTTCAGAA |
| | | ACA | | 2 | CCG |
| 287 | E53SL20 | AAATGTTAAAGGATTCAAC | 290 | E53SL2 | AAGTACAAGAACACCTTCA |
| | | ACA | | 3 | GAA |
| 287 | E53SL20 | AAATGTTAAAGGATTCAAC | 291 | E53SL2 | AGTTGAAAGAATTCAGAAT |
| | | ACA | | 4 | CAG |
| 287 | E53SL20 | AAATGTTAAAGGATTCAAC | 292 | E53SL2 | TAGTTGAAAGAATTCAGAA |
| | | ACA | | 5 | TCA |
| 288 | E53SL21 | GCAACAGTTGAATGAAATG | 289 | E53SL2 | TACAAGAACACCTTCAGAA |
| | | TTA | | 2 | CCG |
| 288 | E53SL21 | GCAACAGTTGAATGAAATG | 290 | E53SL2 | AAGTACAAGAACACCTTCA |
| | | TTA | | 3 | GAA |
| 288 | E53SL21 | GCAACAGTTGAATGAAATG | 291 | E53SL2 | AGTTGAAAGAATTCAGAAT |
| | | TTA | | 4 | CAG |
| 288 | E53SL21 | GCAACAGTTGAATGAAATG | 292 | E53SL2 | TAGTTGAAAGAATTCAGAA |
| | | TTA | | 5 | TCA |
| 289 | E53SL22 | TACAAGAACACCTTCAGAA | 290 | E53SL2 | AAGTACAAGAACACCTTCA |
| | | CCG | | 3 | GAA |
| 289 | E53SL22 | TACAAGAACACCTTCAGAA | 291 | E53SL2 | AGTTGAAAGAATTCAGAAT |
| | | CCG | | 4 | CAG |
| 289 | E53SL22 | TACAAGAACACCTTCAGAA | 292 | E53SL2 | TAGTTGAAAGAATTCAGAA |
| | | CCG | | 5 | TCA |
| 290 | E53SL23 | AAGTACAAGAACACCTTCA | 291 | E53SL2 | AGTTGAAAGAATTCAGAAT |
| | | GAA | | 4 | CAG |
| 290 | E53SL23 | AAGTACAAGAACACCTTCA | 292 | E53SL2 | TAGTTGAAAGAATTCAGAA |
| | | GAA | | 5 | TCA |
| 291 | E53SL24 | AGTTGAAAGAATTCAGAAT | 292 | E53SL2 | TAGTTGAAAGAATTCAGAA |
| | | CAG | | 5 | TCA |
| 924 | E53SL3.1A-Cv5 | CATTTGGATTGCATCTACT | 272 | E53SL4 | TTTTGGATTGCATCTACTG |
| | | GTA | | | TAT |
| 924 | E53SL3.1A-Cv5 | CATTTGGATTGCATCTACT | 273 | E53SL5 | ACCCTCCTTCCATGACTCA |
| | | GTA | | | AGC |
| 924 | E53SL3.1A-Cv5 | CATTTGGATTGCATCTACT | 274 | E53SL6 | CTTCCATGACTCAAGCTTG |
| | | GTA | | | GCT |
| 924 | E53SL3.1A-Cv5 | CATTTGGATTGCATCTACT | 275 | E53SL7 | ACATTTCATTCAACTGTTG |
| | | GTA | | | CCT |
| 924 | E53SL3.1A-Cv5 | CATTTGGATTGCATCTACT | 276 | E53SL8 | TCAACTGTTGCCTCCGGTT |
| | | GTA | | | CTG |
| 924 | E53SL3.1A-Cv5 | CATTTGGATTGCATCTACT | 277 | E53SL1 | CCAAAAGAAAATCACAGAA |
| | | GTA | | 0 | ACC |
| 924 | E53SL3.1A-Cv5 | CATTTGGATTGCATCTACT | 278 | E53SL1 | GCCAAGCTTGAGTCATGGA |
| | | GTA | | 1 | AGG |
| 924 | E53SL3.1A-Cv5 | CATTTGGATTGCATCTACT | 279 | E53SL1 | AGCCAAGCTTGAGTCATGG |
| | | GTA | | 2 | AAG |
| 924 | E53SL3.1A-Cv5 | CATTTGGATTGCATCTACT | 280 | E53SL1 | CAGAGCCAAGCTTGAGTCA |
| | | GTA | | 3 | TGG |
| 924 | E53SL3.1A-Cv5 | CATTTGGATTGCATCTACT | 281 | E53SL1 | AGGCCAGAGCCAAGCTTGA |
| | | GTA | | 4 | GTC |
| 924 | E53SL3.1A-Cv5 | CATTTGGATTGCATCTACT | 282 | E53SL1 | AGAAGCTGAGCAGGTCTTA |
| | | GTA | | 5 | GGA |
| 924 | E53SL3.1A-Cv5 | CATTTGGATTGCATCTACT | 283 | E53SL1 | AAGGAAGAAGCTGAGCAGG |
| | | GTA | | 6 | TCT |
| 924 | E53SL3.1A-Cv5 | CATTTGGATTGCATCTACT | 284 | E53SL1 | GGAAGCTAAGGAAGAAGCT |
| | | GTA | | 7 | GAG |
| 924 | E53SL3.1A-Cv5 | CATTTGGATTGCATCTACT | 285 | E53SL1 | TTCAACACAATGGCTGGAA |
| | | GTA | | 8 | GCT |
| 924 | E53SL3.1A-Cv5 | CATTTGGATTGCATCTACT | 286 | E53SL1 | GTTAAAGGATTCAACACAA |
| | | GTA | | 9 | TGG |
| 924 | E53SL3.1A-Cv5 | CATTTGGATTGCATCTACT | 287 | E53SL2 | AAATGTTAAAGGATTCAAC |
| | | GTA | | 0 | ACA |
| 924 | E53SL3.1A-Cv5 | CATTTGGATTGCATCTACT | 288 | E53SL2 | GCAACAGTTGAATGAAATG |
| | | GTA | | 1 | TTA |
| 924 | E53SL3.1A-Cv5 | CATTTGGATTGCATCTACT | 289 | E53SL2 | TACAAGAACACCTTCAGAA |
| | | GTA | | 2 | CCG |
| 924 | E53SL3.1A-Cv5 | CATTTGGATTGCATCTACT | 290 | E53SL2 | AAGTACAAGAACACCTTCA |
| | | GTA | | 3 | GAA |
| 924 | E53SL3.1A-Cv5 | CATTTGGATTGCATCTACT | 291 | E53SL2 | AGTTGAAAGAATTCAGAAT |
| | | GTA | | 4 | CAG |
| 924 | E53SL3.1A-Cv5 | CATTTGGATTGCATCTACT | 292 | E53SL2 | TAGTTGAAAGAATTCAGAA |
| | | GTA | | 5 | TCA |
| 925 | E53SL3.1C-Cv5 | CCTTTGGATTGCATCTACT | 272 | E53SL4 | TTTTGGATTGCATCTACTG |
| | | GTA | | | TAT |
| 925 | E53SL3.1C-Cv5 | CCTTTGGATTGCATCTACT | 273 | E53SL5 | ACCCTCCTTCCATGACTCA |
| | | GTA | | | AGC |
| 925 | E53SL3.1C-Cv5 | CCTTTGGATTGCATCTACT | 274 | E53SL6 | CTTCCATGACTCAAGCTTG |
| | | GTA | | | GCT |
| 925 | E53SL3.1C-Cv5 | CCTTTGGATTGCATCTACT | 275 | E53SL7 | ACATTTCATTCAACTGTTG |
| | | GTA | | | CCT |
| 925 | E53SL3.1C-Cv5 | CCTTTGGATTGCATCTACT | 276 | E53SL8 | TCAACTGTTGCCTCCGGTT |
| | | GTA | | | CTG |
| 925 | E53SL3.1C-Cv5 | CCTTTGGATTGCATCTACT | 277 | E53SL1 | CCAAAAGAAAATCACAGAA |
| | | GTA | | 0 | ACC |
| 925 | E53SL3.1C-Cv5 | CCTTTGGATTGCATCTACT | 278 | E53SL1 | GCCAAGCTTGAGTCATGGA |
| | | GTA | | 1 | AGG |
| 925 | E53SL3.1C-Cv5 | CCTTTGGATTGCATCTACT | 279 | E53SL1 | AGCCAAGCTTGAGTCATGG |
| | | GTA | | 2 | AAG |
| 925 | E53SL3.1C-Cv5 | CCTTTGGATTGCATCTACT | 280 | E53SL1 | CAGAGCCAAGCTTGAGTCA |
| | | GTA | | 3 | TGG |
| 925 | E53SL3.1C-Cv5 | CCTTTGGATTGCATCTACT | 281 | E53SL1 | AGGCCAGAGCCAAGCTTGA |
| | | GTA | | 4 | GTC |
| 925 | E53SL3.1C-Cv5 | CCTTTGGATTGCATCTACT | 282 | E53SL1 | AGAAGCTGAGCAGGTCTTA |
| | | GTA | | 5 | GGA |
| 925 | E53SL3.1C-Cv5 | CCTTTGGATTGCATCTACT | 283 | E53SL1 | AAGGAAGAAGCTGAGCAGG |
| | | GTA | | 6 | TCT |
| 925 | E53SL3.1C-Cv5 | CCTTTGGATTGCATCTACT | 284 | E53SL1 | GGAAGCTAAGGAAGAAGCT |
| | | GTA | | 7 | GAG |
| 925 | E53SL3.1C-Cv5 | CCTTTGGATTGCATCTACT | 285 | E53SL1 | TTCAACACAATGGCTGGAA |
| | | GTA | | 8 | GCT |
| 925 | E53SL3.1C-Cv5 | CCTTTGGATTGCATCTACT | 286 | E53SL1 | GTTAAAGGATTCAACACAA |
| | | GTA | | 9 | TGG |
| 925 | E53SL3.1C-Cv5 | CCTTTGGATTGCATCTACT | 287 | E53SL2 | AAATGTTAAAGGATTCAAC |
| | | GTA | | 0 | ACA |
| 925 | E53SL3.1C-Cv5 | CCTTTGGATTGCATCTACT | 288 | E53SL2 | GCAACAGTTGAATGAAATG |
| | | GTA | | 1 | TTA |
| 925 | E53SL3.1C-Cv5 | CCTTTGGATTGCATCTACT | 289 | E53SL2 | TACAAGAACACCTTCAGAA |
| | | GTA | | 2 | CCG |
| 925 | E53SL3.1C-Cv5 | CCTTTGGATTGCATCTACT | 290 | E53SL2 | AAGTACAAGAACACCTTCA |
| | | GTA | | 3 | GAA |
| 925 | E53SL3.1C-Cv5 | CCTTTGGATTGCATCTACT | 291 | E53SL2 | AGTTGAAAGAATTCAGAAT |
| | | GTA | | 4 | CAG |
| 925 | E53SL3.1C-Cv5 | CCTTTGGATTGCATCTACT | 292 | E53SL2 | TAGTTGAAAGAATTCAGAA |
| | | GTA | | 5 | TCA |
| 926 | E53S13.1G-Cv5 | CGTTTGGATTGCATCTACT | 272 | E53SL4 | TTTTGGATTGCATCTACTG |
| | | GTA | | | TAT |
| 926 | E53S13.1G-Cv5 | CGTTTGGATTGCATCTACT | 273 | E53SL5 | ACCCTCCTTCCATGACTCA |
| | | GTA | | | AGC |
| 926 | E53S13.1G-Cv5 | CGTTTGGATTGCATCTACT | 274 | E53SL6 | CTTCCATGACTCAAGCTTG |
| | | GTA | | | GCT |
| 926 | E53S13.1G-Cv5 | CGTTTGGATTGCATCTACT | 275 | E53SL7 | ACATTTCATTCAACTGTTG |
| | | GTA | | | CCT |
| 926 | E53S13.1G-Cv5 | CGTTTGGATTGCATCTACT | 276 | E53SL8 | TCAACTGTTGCCTCCGGTT |
| | | GTA | | | CTG |
| 926 | E53S13.1G-Cv5 | CGTTTGGATTGCATCTACT | 277 | E53SL1 | CCAAAAGAAAATCACAGAA |
| | | GTA | | 0 | ACC |
| 926 | E53S13.1G-Cv5 | CGTTTGGATTGCATCTACT | 278 | E53SL1 | GCCAAGCTTGAGTCATGGA |
| | | GTA | | 1 | AGG |
| 926 | E53S13.1G-Cv5 | CGTTTGGATTGCATCTACT | 279 | E53SL1 | AGCCAAGCTTGAGTCATGG |
| | | GTA | | 2 | AAG |
| 926 | E53S13.1G-Cv5 | CGTTTGGATTGCATCTACT | 280 | E53SL1 | CAGAGCCAAGCTTGAGTCA |
| | | GTA | | 3 | TGG |
| 926 | E53S13.1G-Cv5 | CGTTTGGATTGCATCTACT | 281 | E53SL1 | AGGCCAGAGCCAAGCTTGA |
| | | GTA | | 4 | GTC |
| 926 | E53S13.1G-Cv5 | CGTTTGGATTGCATCTACT | 282 | E53SL1 | AGAAGCTGAGCAGGTCTTA |
| | | GTA | | 5 | GGA |
| 926 | E53S13.1G-Cv5 | CGTTTGGATTGCATCTACT | 283 | E53SL1 | AAGGAAGAAGCTGAGCAGG |
| | | GTA | | 6 | TCT |
| 926 | E53S13.1G-Cv5 | CGTTTGGATTGCATCTACT | 284 | E53SL1 | GGAAGCTAAGGAAGAAGCT |
| | | GTA | | 7 | GAG |
| 926 | E53S13.1G-Cv5 | CGTTTGGATTGCATCTACT | 285 | E53SL1 | TTCAACACAATGGCTGGAA |
| | | GTA | | 8 | GCT |
| 926 | E53S13.1G-Cv5 | CGTTTGGATTGCATCTACT | 286 | E53SL1 | GTTAAAGGATTCAACACAA |
| | | GTA | | 9 | TGG |
| 926 | E53S13.1G-Cv5 | CGTTTGGATTGCATCTACT | 287 | E53SL2 | AAATGTTAAAGGATTCAAC |
| | | GTA | | 0 | ACA |
| 926 | E53S13.1G-Cv5 | CGTTTGGATTGCATCTACT | 288 | E53SL2 | GCAACAGTTGAATGAAATG |
| | | GTA | | 1 | TTA |
| 926 | E53S13.1G-Cv5 | CGTTTGGATTGCATCTACT | 289 | E53SL2 | TACAAGAACACCTTCAGAA |
| | | GTA | | 2 | CCG |
| 926 | E53S13.1G-Cv5 | CGTTTGGATTGCATCTACT | 290 | E53SL2 | AAGTACAAGAACACCTTCA |
| | | GTA | | 3 | GAA |
| 926 | E53S13.1G-Cv5 | CGTTTGGATTGCATCTACT | 291 | E53SL2 | AGTTGAAAGAATTCAGAAT |
| | | GTA | | 4 | CAG |
| 926 | E53S13.1G-Cv5 | CGTTTGGATTGCATCTACT | 292 | E53SL2 | TAGTTGAAAGAATTCAGAA |
| | | GTA | | 5 | TCA |
| 927 | E53S13.2A-Cv5 | CTATTGGATTGCATCTACT | 272 | E53SL4 | TTTTGGATTGCATCTACTG |
| | | GTA | | | TAT |
| 927 | E53S13.2A-Cv5 | CTATTGGATTGCATCTACT | 273 | E53SL5 | ACCCTCCTTCCATGACTCA |
| | | GTA | | | AGC |
| 927 | E53S13.2A-Cv5 | CTATTGGATTGCATCTACT | 274 | E53SL6 | CTTCCATGACTCAAGCTTG |
| | | GTA | | | GCT |
| 927 | E53S13.2A-Cv5 | CTATTGGATTGCATCTACT | 275 | E53SL7 | ACATTTCATTCAACTGTTG |
| | | GTA | | | CCT |
| 927 | E53S13.2A-Cv5 | CTATTGGATTGCATCTACT | 276 | E53SL8 | TCAACTGTTGCCTCCGGTT |
| | | GTA | | | CTG |
| 927 | E53S13.2A-Cv5 | CTATTGGATTGCATCTACT | 277 | E53SL1 | CCAAAAGAAAATCACAGAA |
| | | GTA | | 0 | ACC |
| 927 | E53S13.2A-Cv5 | CTATTGGATTGCATCTACT | 278 | E53SL1 | GCCAAGCTTGAGTCATGGA |
| | | GTA | | 1 | AGG |
| 927 | E53S13.2A-Cv5 | CTATTGGATTGCATCTACT | 279 | E53SL1 | AGCCAAGCTTGAGTCATGG |
| | | GTA | | 2 | AAG |
| 927 | E53S13.2A-Cv5 | CTATTGGATTGCATCTACT | 280 | E53SL1 | CAGAGCCAAGCTTGAGTCA |
| | | GTA | | 3 | TGG |
| 927 | E53S13.2A-Cv5 | CTATTGGATTGCATCTACT | 281 | E53SL1 | AGGCCAGAGCCAAGCTTGA |
| | | GTA | | 4 | GTC |
| 927 | E53S13.2A-Cv5 | CTATTGGATTGCATCTACT | 282 | E53SL1 | AGAAGCTGAGCAGGTCTTA |
| | | GTA | | 5 | GGA |
| 927 | E53S13.2A-Cv5 | CTATTGGATTGCATCTACT | 283 | E53SL1 | AAGGAAGAAGCTGAGCAGG |
| | | GTA | | 6 | TCT |
| 927 | E53S13.2A-Cv5 | CTATTGGATTGCATCTACT | 284 | E53SL1 | GGAAGCTAAGGAAGAAGCT |
| | | GTA | | 7 | GAG |
| 927 | E53S13.2A-Cv5 | CTATTGGATTGCATCTACT | 285 | E53SL1 | TTCAACACAATGGCTGGAA |
| | | GTA | | 8 | GCT |
| 927 | E53S13.2A-Cv5 | CTATTGGATTGCATCTACT | 286 | E53SL1 | GTTAAAGGATTCAACACAA |
| | | GTA | | 9 | TGG |
| 927 | E53S13.2A-Cv5 | CTATTGGATTGCATCTACT | 287 | E53SL2 | AAATGTTAAAGGATTCAAC |
| | | GTA | | 0 | ACA |
| 927 | E53S13.2A-Cv5 | CTATTGGATTGCATCTACT | 288 | E53SL2 | GCAACAGTTGAATGAAATG |
| | | GTA | | 1 | TTA |
| 927 | E53S13.2A-Cv5 | CTATTGGATTGCATCTACT | 289 | E53SL2 | TACAAGAACACCTTCAGAA |
| | | GTA | | 2 | CCG |
| 927 | E53S13.2A-Cv5 | CTATTGGATTGCATCTACT | 290 | E53SL2 | AAGTACAAGAACACCTTCA |
| | | GTA | | 3 | GAA |
| 927 | E53S13.2A-Cv5 | CTATTGGATTGCATCTACT | 291 | E53SL2 | AGTTGAAAGAATTCAGAAT |
| | | GTA | | 4 | CAG |
| 927 | E53S13.2A-Cv5 | CTATTGGATTGCATCTACT | 292 | E53SL2 | TAGTTGAAAGAATTCAGAA |
| | | GTA | | 5 | TCA |
| 928 | E53S13.2C-Cv5 | CTCTTGGATTGCATCTACT | 272 | E53SL4 | TTTTGGATTGCATCTACTG |
| | | GTA | | | TAT |
| 928 | E53S13.2C-Cv5 | CTCTTGGATTGCATCTACT | 273 | E53SL5 | ACCCTCCTTCCATGACTCA |
| | | GTA | | | AGC |
| 928 | E53S13.2C-Cv5 | CTCTTGGATTGCATCTACT | 274 | E53SL6 | CTTCCATGACTCAAGCTTG |
| | | GTA | | | GCT |
| 928 | E53S13.2C-Cv5 | CTCTTGGATTGCATCTACT | 275 | E53SL7 | ACATTTCATTCAACTGTTG |
| | | GTA | | | CCT |
| 928 | E53S13.2C-Cv5 | CTCTTGGATTGCATCTACT | 276 | E53SL8 | TCAACTGTTGCCTCCGGTT |
| | | GTA | | | CTG |
| 928 | E53S13.2C-Cv5 | CTCTTGGATTGCATCTACT | 277 | E53SL1 | CCAAAAGAAAATCACAGAA |
| | | GTA | | 0 | ACC |
| 928 | E53S13.2C-Cv5 | CTCTTGGATTGCATCTACT | 278 | E53SL1 | GCCAAGCTTGAGTCATGGA |
| | | GTA | | 1 | AGG |
| 928 | E53S13.2C-Cv5 | CTCTTGGATTGCATCTACT | 279 | E53SL1 | AGCCAAGCTTGAGTCATGG |
| | | GTA | | 2 | AAG |
| 928 | E53S13.2C-Cv5 | CTCTTGGATTGCATCTACT | 280 | E53SL1 | CAGAGCCAAGCTTGAGTCA |
| | | GTA | | 3 | TGG |
| 928 | E53S13.2C-Cv5 | CTCTTGGATTGCATCTACT | 281 | E53SL1 | AGGCCAGAGCCAAGCTTGA |
| | | GTA | | 4 | GTC |
| 928 | E53S13.2C-Cv5 | CTCTTGGATTGCATCTACT | 282 | E53SL1 | AGAAGCTGAGCAGGTCTTA |
| | | GTA | | 5 | GGA |
| 928 | E53S13.2C-Cv5 | CTCTTGGATTGCATCTACT | 283 | E53SL1 | AAGGAAGAAGCTGAGCAGG |
| | | GTA | | 6 | TCT |
| 928 | E53S13.2C-Cv5 | CTCTTGGATTGCATCTACT | 284 | E53SL1 | GGAAGCTAAGGAAGAAGCT |
| | | GTA | | 7 | GAG |
| 928 | E53S13.2C-Cv5 | CTCTTGGATTGCATCTACT | 285 | E53SL1 | TTCAACACAATGGCTGGAA |
| | | GTA | | 8 | GCT |
| 928 | E53S13.2C-Cv5 | CTCTTGGATTGCATCTACT | 286 | E53SL1 | GTTAAAGGATTCAACACAA |
| | | GTA | | 9 | TGG |
| 928 | E53S13.2C-Cv5 | CTCTTGGATTGCATCTACT | 287 | E53SL2 | AAATGTTAAAGGATTCAAC |
| | | GTA | | 0 | ACA |
| 928 | E53S13.2C-Cv5 | CTCTTGGATTGCATCTACT | 288 | E53SL2 | GCAACAGTTGAATGAAATG |
| | | GTA | | 1 | TTA |
| 928 | E53S13.2C-Cv5 | CTCTTGGATTGCATCTACT | 289 | E53SL2 | TACAAGAACACCTTCAGAA |
| | | GTA | | 2 | CCG |
| 928 | E53S13.2C-Cv5 | CTCTTGGATTGCATCTACT | 290 | E53SL2 | AAGTACAAGAACACCTTCA |
| | | GTA | | 3 | GAA |
| 928 | E53S13.2C-Cv5 | CTCTTGGATTGCATCTACT | 291 | E53SL2 | AGTTGAAAGAATTCAGAAT |
| | | GTA | | 4 | CAG |
| 928 | E53S13.2C-Cv5 | CTCTTGGATTGCATCTACT | 292 | E53SL2 | TAGTTGAAAGAATTCAGAA |
| | | GTA | | 5 | TCA |
| 929 | E53S13.2G-Cv5 | CTGTTGGATTGCATCTACT | 272 | E53SL4 | TTTTGGATTGCATCTACTG |
| | | GTA | | | TAT |
| 929 | E53S13.2G-Cv5 | CTGTTGGATTGCATCTACT | 273 | E53SL5 | ACCCTCCTTCCATGACTCA |
| | | GTA | | | AGC |
| 929 | E53S13.2G-Cv5 | CTGTTGGATTGCATCTACT | 274 | E53SL6 | CTTCCATGACTCAAGCTTG |
| | | GTA | | | GCT |
| 929 | E53S13.2G-Cv5 | CTGTTGGATTGCATCTACT | 275 | E53SL7 | ACATTTCATTCAACTGTTG |
| | | GTA | | | CCT |
| 929 | E53S13.2G-Cv5 | CTGTTGGATTGCATCTACT | 276 | E53SL8 | TCAACTGTTGCCTCCGGTT |
| | | GTA | | | CTG |
| 929 | E53S13.2G-Cv5 | CTGTTGGATTGCATCTACT | 277 | E53SL1 | CCAAAAGAAAATCACAGAA |
| | | GTA | | 0 | ACC |
| 929 | E53S13.2G-Cv5 | CTGTTGGATTGCATCTACT | 278 | E53SL1 | GCCAAGCTTGAGTCATGGA |
| | | GTA | | 1 | AGG |
| 929 | E53S13.2G-Cv5 | CTGTTGGATTGCATCTACT | 279 | E53SL1 | AGCCAAGCTTGAGTCATGG |
| | | GTA | | 2 | AAG |
| 929 | E53S13.2G-Cv5 | CTGTTGGATTGCATCTACT | 280 | E53SL1 | CAGAGCCAAGCTTGAGTCA |
| | | GTA | | 3 | TGG |
| 929 | E53S13.2G-Cv5 | CTGTTGGATTGCATCTACT | 281 | E53SL1 | AGGCCAGAGCCAAGCTTGA |
| | | GTA | | 4 | GTC |
| 929 | E53S13.2G-Cv5 | CTGTTGGATTGCATCTACT | 282 | E53SL1 | AGAAGCTGAGCAGGTCTTA |
| | | GTA | | 5 | GGA |
| 929 | E53S13.2G-Cv5 | CTGTTGGATTGCATCTACT | 283 | E53SL1 | AAGGAAGAAGCTGAGCAGG |
| | | GTA | | 6 | TCT |
| 929 | E53S13.2G-Cv5 | CTGTTGGATTGCATCTACT | 284 | E53SL1 | GGAAGCTAAGGAAGAAGCT |
| | | GTA | | 7 | GAG |
| 929 | E53S13.2G-Cv5 | CTGTTGGATTGCATCTACT | 285 | E53SL1 | TTCAACACAATGGCTGGAA |
| | | GTA | | 8 | GCT |
| 929 | E53S13.2G-Cv5 | CTGTTGGATTGCATCTACT | 286 | E53SL1 | GTTAAAGGATTCAACACAA |
| | | GTA | | 9 | TGG |
| 929 | E53S13.2G-Cv5 | CTGTTGGATTGCATCTACT | 287 | E53SL2 | AAATGTTAAAGGATTCAAC |
| | | GTA | | 0 | ACA |
| 929 | E53S13.2G-Cv5 | CTGTTGGATTGCATCTACT | 288 | E53SL2 | GCAACAGTTGAATGAAATG |
| | | GTA | | 1 | TTA |
| 929 | E53S13.2G-Cv5 | CTGTTGGATTGCATCTACT | 289 | E53SL2 | TACAAGAACACCTTCAGAA |
| | | GTA | | 2 | CCG |
| 929 | E53S13.2G-Cv5 | CTGTTGGATTGCATCTACT | 290 | E53SL2 | AAGTACAAGAACACCTTCA |
| | | GTA | | 3 | GAA |
| 929 | E53S13.2G-Cv5 | CTGTTGGATTGCATCTACT | 291 | E53SL2 | AGTTGAAAGAATTCAGAAT |
| | | GTA | | 4 | CAG |
| 929 | E53S13.2G-Cv5 | CTGTTGGATTGCATCTACT | 292 | E53SL2 | TAGTTGAAAGAATTCAGAA |
| | | GTA | | 5 | TCA |
| 930 | E53S13.3A-Cv5 | CTTATGGATTGCATCTACT | 272 | E53SL4 | TTTTGGATTGCATCTACTG |
| | | GTA | | | TAT |
| 930 | E53S13.3A-Cv5 | CTTATGGATTGCATCTACT | 273 | E53SL5 | ACCCTCCTTCCATGACTCA |
| | | GTA | | | AGC |
| 930 | E53S13.3A-Cv5 | CTTATGGATTGCATCTACT | 274 | E53SL6 | CTTCCATGACTCAAGCTTG |
| | | GTA | | | GCT |
| 930 | E53S13.3A-Cv5 | CTTATGGATTGCATCTACT | 275 | E53SL7 | ACATTTCATTCAACTGTTG |
| | | GTA | | | CCT |
| 930 | E53S13.3A-Cv5 | CTTATGGATTGCATCTACT | 276 | | TCAACTGTTGCCTCCGGTT |
| | | GTA | | E53SL8 | CTG |
| 930 | E53S13.3A-Cv5 | CTTATGGATTGCATCTACT | 277 | E53SL1 | CCAAAAGAAAATCACAGAA |
| | | GTA | | 0 | ACC |
| 930 | E53S13.3A-Cv5 | CTTATGGATTGCATCTACT | 278 | E53SL1 | GCCAAGCTTGAGTCATGGA |
| | | GTA | | 1 | AGG |
| 930 | E53S13.3A-Cv5 | CTTATGGATTGCATCTACT | 279 | E53SL1 | AGCCAAGCTTGAGTCATGG |
| | | GTA | | 2 | AAG |
| 930 | E53S13.3A-Cv5 | CTTATGGATTGCATCTACT | 280 | E53SL1 | CAGAGCCAAGCTTGAGTCA |
| | | GTA | | 3 | TGG |
| 930 | E53S13.3A-Cv5 | CTTATGGATTGCATCTACT | 281 | E53SL1 | AGGCCAGAGCCAAGCTTGA |
| | | GTA | | 4 | GTC |
| 930 | E53S13.3A-Cv5 | CTTATGGATTGCATCTACT | 282 | E53SL1 | AGAAGCTGAGCAGGTCTTA |
| | | GTA | | 5 | GGA |
| 930 | E53S13.3A-Cv5 | CTTATGGATTGCATCTACT | 283 | E53SL1 | AAGGAAGAAGCTGAGCAGG |
| | | GTA | | 6 | TCT |
| 930 | E53S13.3A-Cv5 | CTTATGGATTGCATCTACT | 284 | E53SL1 | GGAAGCTAAGGAAGAAGCT |
| | | GTA | | 7 | GAG |
| 930 | E53S13.3A-Cv5 | CTTATGGATTGCATCTACT | 285 | E53SL1 | TTCAACACAATGGCTGGAA |
| | | GTA | | 8 | GCT |
| 930 | E53S13.3A-Cv5 | CTTATGGATTGCATCTACT | 286 | E53SL1 | GTTAAAGGATTCAACACAA |
| | | GTA | | 9 | TGG |
| 930 | E53S13.3A-Cv5 | CTTATGGATTGCATCTACT | 287 | E53SL2 | AAATGTTAAAGGATTCAAC |
| | | GTA | | 0 | ACA |
| 930 | E53S13.3A-Cv5 | CTTATGGATTGCATCTACT | 288 | E53SL2 | GCAACAGTTGAATGAAATG |
| | | GTA | | 7 | TTA |
| 930 | E53S13.3A-Cv5 | CTTATGGATTGCATCTACT | 289 | E53SL2 | TACAAGAACACCTTCAGAA |
| | | GTA | | 2 | CCG |
| 930 | E53S13.3A-Cv5 | CTTATGGATTGCATCTACT | 290 | E53SL2 | AAGTACAAGAACACCTTCA |
| | | GTA | | 3 | GAA |
| 930 | E53S13.3A-Cv5 | CTTATGGATTGCATCTACT | 291 | E53SL2 | AGTTGAAAGAATTCAGAAT |
| | | GTA | | 4 | CAG |
| 930 | E53S13.3A-Cv5 | CTTATGGATTGCATCTACT | 292 | E53SL2 | TAGTTGAAAGAATTCAGAA |
| | | GTA | | 5 | TCA |
| 931 | E53S13.3C-Cv5 | CTTCTGGATTGCATCTACT | 272 | E53SL4 | TTTTGGATTGCATCTACTG |
| | | GTA | | | TAT |
| 931 | E53S13.3C-Cv5 | CTTCTGGATTGCATCTACT | 273 | E53SL5 | ACCCTCCTTCCATGACTCA |
| | | GTA | | | AGC |
| 931 | E53S13.3C-Cv5 | CTTCTGGATTGCATCTACT | 274 | E53SL6 | CTTCCATGACTCAAGCTTG |
| | | GTA | | | GCT |
| 931 | E53S13.3C-Cv5 | CTTCTGGATTGCATCTACT | 275 | E53SL7 | ACATTTCATTCAACTGTTG |
| | | GTA | | | CCT |
| 931 | E53S13.3C-Cv5 | CTTCTGGATTGCATCTACT | 276 | E53SL8 | TCAACTGTTGCCTCCGGTT |
| | | GTA | | | CTG |
| 931 | E53S13.3C-Cv5 | CTTCTGGATTGCATCTACT | 277 | E53SL1 | CCAAAAGAAAATCACAGAA |
| | | GTA | | 0 | ACC |
| 931 | E53S13.3C-Cv5 | CTTCTGGATTGCATCTACT | 278 | E53SL1 | GCCAAGCTTGAGTCATGGA |
| | | GTA | | 1 | AGG |
| 931 | E53S13.3C-Cv5 | CTTCTGGATTGCATCTACT | 279 | E53SL1 | AGCCAAGCTTGAGTCATGG |
| | | GTA | | 2 | AAG |
| 931 | E53S13.3C-Cv5 | CTTCTGGATTGCATCTACT | 280 | E53SL1 | CAGAGCCAAGCTTGAGTCA |
| | | GTA | | 3 | TGG |
| 931 | E53S13.3C-Cv5 | CTTCTGGATTGCATCTACT | 281 | E53SL1 | AGGCCAGAGCCAAGCTTGA |
| | | GTA | | 4 | GTC |
| 931 | E53S13.3C-Cv5 | CTTCTGGATTGCATCTACT | 282 | E53SL1 | AGAAGCTGAGCAGGTCTTA |
| | | GTA | | 5 | GGA |
| 931 | E53S13.3C-Cv5 | CTTCTGGATTGCATCTACT | 283 | E53SL1 | AAGGAAGAAGCTGAGCAGG |
| | | GTA | | 6 | TCT |
| 931 | E53S13.3C-Cv5 | CTTCTGGATTGCATCTACT | 284 | E53SL1 | GGAAGCTAAGGAAGAAGCT |
| | | GTA | | 7 | GAG |
| 931 | E53S13.3C-Cv5 | CTTCTGGATTGCATCTACT | 285 | E53SL1 | TTCAACACAATGGCTGGAA |
| | | GTA | | 8 | GCT |
| 931 | E53S13.3C-Cv5 | CTTCTGGATTGCATCTACT | 286 | E53SL1 | GTTAAAGGATTCAACACAA |
| | | GTA | | 9 | TGG |
| 931 | E53S13.3C-Cv5 | CTTCTGGATTGCATCTACT | 287 | E53SL2 | AAATGTTAAAGGATTCAAC |
| | | GTA | | 0 | ACA |
| 931 | E53S13.3C-Cv5 | CTTCTGGATTGCATCTACT | 288 | E53SL2 | GCAACAGTTGAATGAAATG |
| | | GTA | | 1 | TTA |
| 931 | E53S13.3C-Cv5 | CTTCTGGATTGCATCTACT | 289 | E53SL2 | TACAAGAACACCTTCAGAA |
| | | GTA | | 2 | CCG |
| 931 | E53S13.3C-Cv5 | CTTCTGGATTGCATCTACT | 290 | E53SL2 | AAGTACAAGAACACCTTCA |
| | | GTA | | 3 | GAA |
| 931 | E53S13.3C-Cv5 | CTTCTGGATTGCATCTACT | 291 | E53SL2 | AGTTGAAAGAATTCAGAAT |
| | | GTA | | 4 | CAG |
| 931 | E53S13.3C-Cv5 | CTTCTGGATTGCATCTACT | 292 | E53SL2 | TAGTTGAAAGAATTCAGAA |
| | | GTA | | 5 | TCA |
| 932 | E53S13.3G-Cv5 | CTTGTGGATTGCATCTACT | 272 | E53SL4 | TTTTGGATTGCATCTACTG |
| | | GTA | | | TAT |
| 932 | E53S13.3G-Cv5 | CTTGTGGATTGCATCTACT | 273 | E53SL5 | ACCCTCCTTCCATGACTCA |
| | | GTA | | | AGC |
| 932 | E53S13.3G-Cv5 | CTTGTGGATTGCATCTACT | 274 | E53SL6 | CTTCCATGACTCAAGCTTG |
| | | GTA | | | GCT |
| 932 | E53S13.3G-Cv5 | CTTGTGGATTGCATCTACT | 275 | E53SL7 | ACATTTCATTCAACTGTTG |
| | | GTA | | | CCT |
| 932 | E53S13.3G-Cv5 | CTTGTGGATTGCATCTACT | 276 | E53SL8 | TCAACTGTTGCCTCCGGTT |
| | | GTA | | | CTG |
| 932 | E53S13.3G-Cv5 | CTTGTGGATTGCATCTACT | 277 | E53SL1 | CCAAAAGAAAATCACAGAA |
| | | GTA | | 0 | ACC |
| 932 | E53S13.3G-Cv5 | CTTGTGGATTGCATCTACT | 278 | E53SL1 | GCCAAGCTTGAGTCATGGA |
| | | GTA | | 1 | AGG |
| 932 | E53S13.3G-Cv5 | CTTGTGGATTGCATCTACT | 279 | E53SL1 | AGCCAAGCTTGAGTCATGG |
| | | GTA | | 2 | AAG |
| 932 | E53S13.3G-Cv5 | CTTGTGGATTGCATCTACT | 280 | E53SL1 | CAGAGCCAAGCTTGAGTCA |
| | | GTA | | 3 | TGG |
| 932 | E53S13.3G-Cv5 | CTTGTGGATTGCATCTACT | 281 | E53SL1 | AGGCCAGAGCCAAGCTTGA |
| | | GTA | | 4 | GTC |
| 932 | E53S13.3G-Cv5 | CTTGTGGATTGCATCTACT | 282 | E53SL1 | AGAAGCTGAGCAGGTCTTA |
| | | GTA | | 5 | GGA |
| 932 | E53S13.3G-Cv5 | CTTGTGGATTGCATCTACT | 283 | E53SL1 | AAGGAAGAAGCTGAGCAGG |
| | | GTA | | 6 | TCT |
| 932 | E53S13.3G-Cv5 | CTTGTGGATTGCATCTACT | 284 | E53SL1 | GGAAGCTAAGGAAGAAGCT |
| | | GTA | | 7 | GAG |
| 932 | E53S13.3G-Cv5 | CTTGTGGATTGCATCTACT | 285 | E53SL1 | TTCAACACAATGGCTGGAA |
| | | GTA | | 8 | GCT |
| 932 | E53S13.3G-Cv5 | CTTGTGGATTGCATCTACT | 286 | E53SL1 | GTTAAAGGATTCAACACAA |
| | | GTA | | 9 | TGG |
| 932 | E53S13.3G-Cv5 | CTTGTGGATTGCATCTACT | 287 | E53SL2 | AAATGTTAAAGGATTCAAC |
| | | GTA | | 0 | ACA |
| 932 | E53S13.3G-Cv5 | CTTGTGGATTGCATCTACT | 288 | E53SL2 | GCAACAGTTGAATGAAATG |
| | | GTA | | 1 | TTA |
| 932 | E53S13.3G-Cv5 | CTTGTGGATTGCATCTACT | 289 | E53SL2 | TACAAGAACACCTTCAGAA |
| | | GTA | | 2 | CCG |
| 932 | E53S13.3G-Cv5 | CTTGTGGATTGCATCTACT | 290 | E53SL2 | AAGTACAAGAACACCTTCA |
| | | GTA | | 3 | GAA |
| 932 | E53S13.3G-Cv5 | CTTGTGGATTGCATCTACT | 291 | E53SL2 | AGTTGAAAGAATTCAGAAT |
| | | GTA | | 4 | CAG |
| 932 | E53S13.3G-Cv5 | CTTGTGGATTGCATCTACT | 292 | E53SL2 | TAGTTGAAAGAATTCAGAA |
| | | GTA | | 5 | TCA |
| 933 | E53S13.4A-Cv5 | CTTTAGGATTGCATCTACT | 272 | E53SL4 | TTTTGGATTGCATCTACTG |
| | | GTA | | | TAT |
| 933 | E53S13.4A-Cv5 | CTTTAGGATTGCATCTACT | 273 | E53SL5 | ACCCTCCTTCCATGACTCA |
| | | GTA | | | AGC |
| 933 | E53S13.4A-Cv5 | CTTTAGGATTGCATCTACT | 274 | E53SL6 | CTTCCATGACTCAAGCTTG |
| | | GTA | | | GCT |
| 933 | E53S13.4A-Cv5 | CTTTAGGATTGCATCTACT | 275 | E53SL7 | ACATTTCATTCAACTGTTG |
| | | GTA | | | CCT |
| 933 | E53S13.4A-Cv5 | CTTTAGGATTGCATCTACT | 276 | E53SL8 | TCAACTGTTGCCTCCGGTT |
| | | GTA | | | CTG |
| 933 | E53S13.4A-Cv5 | CTTTAGGATTGCATCTACT | 277 | E53SL1 | CCAAAAGAAAATCACAGAA |
| | | GTA | | 0 | ACC |
| 933 | E53S13.4A-Cv5 | CTTTAGGATTGCATCTACT | 278 | E53SL1 | GCCAAGCTTGAGTCATGGA |
| | | GTA | | 1 | AGG |
| 933 | E53S13.4A-Cv5 | CTTTAGGATTGCATCTACT | 279 | E53SL1 | AGCCAAGCTTGAGTCATGG |
| | | GTA | | 2 | AAG |
| 933 | E53S13.4A-Cv5 | CTTTAGGATTGCATCTACT | 280 | E53SL1 | CAGAGCCAAGCTTGAGTCA |
| | | GTA | | 3 | TGG |
| 933 | E53S13.4A-Cv5 | CTTTAGGATTGCATCTACT | 281 | E53SL1 | AGGCCAGAGCCAAGCTTGA |
| | | GTA | | 4 | GTC |
| 933 | E53S13.4A-Cv5 | CTTTAGGATTGCATCTACT | 282 | E53SL1 | AGAAGCTGAGCAGGTCTTA |
| | | GTA | | 5 | GGA |
| 933 | E53S13.4A-Cv5 | CTTTAGGATTGCATCTACT | 283 | E53SL1 | AAGGAAGAAGCTGAGCAGG |
| | | GTA | | 6 | TCT |
| 933 | E53S13.4A-Cv5 | CTTTAGGATTGCATCTACT | 284 | E53SL1 | GGAAGCTAAGGAAGAAGCT |
| | | GTA | | 7 | GAG |
| 933 | E53S13.4A-Cv5 | CTTTAGGATTGCATCTACT | 285 | E53SL1 | TTCAACACAATGGCTGGAA |
| | | GTA | | 8 | GCT |
| 933 | E53S13.4A-Cv5 | CTTTAGGATTGCATCTACT | 286 | E53SL1 | GTTAAAGGATTCAACACAA |
| | | GTA | | 9 | TGG |
| 933 | E53S13.4A-Cv5 | CTTTAGGATTGCATCTACT | 287 | E53SL2 | AAATGTTAAAGGATTCAAC |
| | | GTA | | 0 | ACA |
| 933 | E53S13.4A-Cv5 | CTTTAGGATTGCATCTACT | 288 | E53SL2 | GCAACAGTTGAATGAAATG |
| | | GTA | | 1 | TTA |
| 933 | E53S13.4A-Cv5 | CTTTAGGATTGCATCTACT | 289 | E53SL2 | TACAAGAACACCTTCAGAA |
| | | GTA | | 2 | CCG |
| 933 | E53S13.4A-Cv5 | CTTTAGGATTGCATCTACT | 290 | E53SL2 | AAGTACAAGAACACCTTCA |
| | | GTA | | 3 | GAA |
| 933 | E53S13.4A-Cv5 | CTTTAGGATTGCATCTACT | 291 | E53SL2 | AGTTGAAAGAATTCAGAAT |
| | | GTA | | 4 | CAG |
| 933 | E53S13.4A-Cv5 | CTTTAGGATTGCATCTACT | 292 | E53SL2 | TAGTTGAAAGAATTCAGAA |
| | | GTA | | 5 | TCA |
| 934 | E53S13.4C-Cv5 | CTTTCGGATTGCATCTACT | 272 | E53SL4 | TTTTGGATTGCATCTACTG |
| | | GTA | | | TAT |
| 934 | E53S13.4C-Cv5 | CTTTCGGATTGCATCTACT | 273 | E53SL5 | ACCCTCCTTCCATGACTCA |
| | | GTA | | | AGC |
| 934 | E53S13.4C-Cv5 | CTTTCGGATTGCATCTACT | 274 | E53SL6 | CTTCCATGACTCAAGCTTG |
| | | GTA | | | GCT |
| 934 | E53S13.4C-Cv5 | CTTTCGGATTGCATCTACT | 275 | E53SL7 | ACATTTCATTCAACTGTTG |
| | | GTA | | | CCT |
| 934 | E53S13.4C-Cv5 | CTTTCGGATTGCATCTACT | 276 | E53SL8 | TCAACTGTTGCCTCCGGTT |
| | | GTA | | | CTG |
| 934 | E53S13.4C-Cv5 | CTTTCGGATTGCATCTACT | 277 | E53SL1 | CCAAAAGAAAATCACAGAA |
| | | GTA | | 0 | ACC |
| 934 | E53S13.4C-Cv5 | CTTTCGGATTGCATCTACT | 278 | E53SL1 | GCCAAGCTTGAGTCATGGA |
| | | GTA | | 1 | AGG |
| 934 | E53S13.4C-Cv5 | CTTTCGGATTGCATCTACT | 279 | E53SL1 | AGCCAAGCTTGAGTCATGG |
| | | GTA | | 2 | AAG |
| 934 | E53S13.4C-Cv5 | CTTTCGGATTGCATCTACT | 280 | E53SL1 | CAGAGCCAAGCTTGAGTCA |
| | | GTA | | 3 | TGG |
| 934 | E53S13.4C-Cv5 | CTTTCGGATTGCATCTACT | 281 | E53SL1 | AGGCCAGAGCCAAGCTTGA |
| | | GTA | | 4 | GTC |
| 934 | E53S13.4C-Cv5 | CTTTCGGATTGCATCTACT | 282 | E53SL1 | AGAAGCTGAGCAGGTCTTA |
| | | GTA | | 5 | GGA |
| 934 | E53S13.4C-Cv5 | CTTTCGGATTGCATCTACT | 283 | E53SL1 | AAGGAAGAAGCTGAGCAGG |
| | | GTA | | 6 | TCT |
| 934 | E53S13.4C-Cv5 | CTTTCGGATTGCATCTACT | 284 | E53SL1 | GGAAGCTAAGGAAGAAGCT |
| | | GTA | | 7 | GAG |
| 934 | E53S13.4C-Cv5 | CTTTCGGATTGCATCTACT | 285 | E53SL1 | TTCAACACAATGGCTGGAA |
| | | GTA | | 8 | GCT |
| 934 | E53S13.4C-Cv5 | CTTTCGGATTGCATCTACT | 286 | E53SL1 | GTTAAAGGATTCAACACAA |
| | | GTA | | 9 | TGG |
| 934 | E53S13.4C-Cv5 | CTTTCGGATTGCATCTACT | 287 | E53SL2 | AAATGTTAAAGGATTCAAC |
| | | GTA | | 0 | ACA |
| 934 | E53S13.4C-Cv5 | CTTTCGGATTGCATCTACT | 288 | E53SL2 | GCAACAGTTGAATGAAATG |
| | | GTA | | 1 | TTA |
| 934 | E53S13.4C-Cv5 | CTTTCGGATTGCATCTACT | 289 | E53SL2 | TACAAGAACACCTTCAGAA |
| | | GTA | | 2 | CCG |
| 934 | E53S13.4C-Cv5 | CTTTCGGATTGCATCTACT | 290 | E53SL2 | AAGTACAAGAACACCTTCA |
| | | GTA | | 3 | GAA |
| 934 | E53S13.4C-Cv5 | CTTTCGGATTGCATCTACT | 291 | E53SL2 | AGTTGAAAGAATTCAGAAT |
| | | GTA | | 4 | CAG |
| 934 | E53S13.4C-Cv5 | CTTTCGGATTGCATCTACT | 292 | E53SL2 | TAGTTGAAAGAATTCAGAA |
| | | GTA | | 5 | TCA |
| 935 | E53S13.4G-Cv5 | CTTTGGGATTGCATCTACT | 272 | E53SL4 | TTTTGGATTGCATCTACTG |
| | | GTA | | | TAT |
| 935 | E53S13.4G-Cv5 | CTTTGGGATTGCATCTACT | 273 | E53SL5 | ACCCTCCTTCCATGACTCA |
| | | GTA | | | AGC |
| 935 | E53S13.4G-Cv5 | CTTTGGGATTGCATCTACT | 274 | E53SL6 | CTTCCATGACTCAAGCTTG |
| | | GTA | | | GCT |
| 935 | E53S13.4G-Cv5 | CTTTGGGATTGCATCTACT | 275 | E53SL7 | ACATTTCATTCAACTGTTG |
| | | GTA | | | CCT |
| 935 | E53S13.4G-Cv5 | CTTTGGGATTGCATCTACT | 276 | E53SL8 | TCAACTGTTGCCTCCGGTT |
| | | GTA | | | CTG |
| 935 | E53S13.4G-Cv5 | CTTTGGGATTGCATCTACT | 277 | E53SL1 | CCAAAAGAAAATCACAGAA |
| | | GTA | | 0 | ACC |
| 935 | E53S13.4G-Cv5 | CTTTGGGATTGCATCTACT | 278 | E53SL1 | GCCAAGCTTGAGTCATGGA |
| | | GTA | | 1 | AGG |
| 935 | E53S13.4G-Cv5 | CTTTGGGATTGCATCTACT | 279 | E53SL1 | AGCCAAGCTTGAGTCATGG |
| | | GTA | | 2 | AAG |
| 935 | E53S13.4G-Cv5 | CTTTGGGATTGCATCTACT | 280 | E53SL1 | CAGAGCCAAGCTTGAGTCA |
| | | GTA | | 3 | TGG |
| 935 | E53S13.4G-Cv5 | CTTTGGGATTGCATCTACT | 281 | E53SL1 | AGGCCAGAGCCAAGCTTGA |
| | | GTA | | 4 | GTC |
| 935 | E53S13.4G-Cv5 | CTTTGGGATTGCATCTACT | 282 | E53SL1 | AGAAGCTGAGCAGGTCTTA |
| | | GTA | | 5 | GGA |
| 935 | E53S13.4G-Cv5 | CTTTGGGATTGCATCTACT | 283 | E53SL1 | AAGGAAGAAGCTGAGCAGG |
| | | GTA | | 6 | TCT |
| 935 | E53S13.4G-Cv5 | CTTTGGGATTGCATCTACT | 284 | E53SL1 | GGAAGCTAAGGAAGAAGCT |
| | | GTA | | 7 | GAG |
| 935 | E53S13.4G-Cv5 | CTTTGGGATTGCATCTACT | 285 | E53SL1 | TTCAACACAATGGCTGGAA |
| | | GTA | | | GCT |
| 935 | E53S13.4G-Cv5 | CTTTGGGATTGCATCTACT | 286 | E53SL1 | GTTAAAGGATTCAACACAA |
| | | GTA | | 9 | TGG |
| 935 | E53S13.4G-Cv5 | CTTTGGGATTGCATCTACT | 287 | E53SL2 | AAATGTTAAAGGATTCAAC |
| | | GTA | | 0 | ACA |
| 935 | E53S13.4G-Cv5 | CTTTGGGATTGCATCTACT | 288 | E53SL2 | GCAACAGTTGAATGAAATG |
| | | GTA | | 1 | TTA |
| 935 | E53S13.4G-Cv5 | CTTTGGGATTGCATCTACT | 289 | E53SL2 | TACAAGAACACCTTCAGAA |
| | | GTA | | 2 | CCG |
| 935 | E53S13.4G-Cv5 | CTTTGGGATTGCATCTACT | 290 | E53SL2 | AAGTACAAGAACACCTTCA |
| | | GTA | | 3 | GAA |
| 935 | E53S13.4G-Cv5 | CTTTGGGATTGCATCTACT | 291 | E53SL2 | AGTTGAAAGAATTCAGAAT |
| | | GTA | | 4 | CAG |
| 935 | E53S13.4G-Cv5 | CTTTGGGATTGCATCTACT | 292 | E53SL2 | TAGTTGAAAGAATTCAGAA |
| | | GTA | | 5 | TCA |
| 936 | E53S13. del2-Cv5 | TTTGGATTGCATCTACTGT | 272 | E53SL4 | TTTTGGATTGCATCTACTG |
| | | A | | | TAT |
| 936 | E53S13. del2-Cv5 | TTTGGATTGCATCTACTGT | 273 | E53SL5 | ACCCTCCTTCCATGACTCA |
| | | A | | | AGC |
| 936 | E53S13. del2-Cv5 | TTTGGATTGCATCTACTGT | 274 | E53SL6 | CTTCCATGACTCAAGCTTG |
| | | A | | | GCT |
| 936 | E53S13.del2-Cv5 | TTTGGATTGCATCTACTGT | 275 | E53SL7 | ACATTTCATTCAACTGTTG |
| | | A | | | CCT |
| 936 | E53S13.del2-Cv5 | TTTGGATTGCATCTACTGT | 276 | E53SL8 | TCAACTGTTGCCTCCGGTT |
| | | A | | | CTG |
| 936 | E53S13.del2-Cv5 | TTTGGATTGCATCTACTGT | 277 | E53SL1 | CCAAAAGAAAATCACAGAA |
| | | A | | 0 | ACC |
| 936 | E53S13.del2-Cv5 | TTTGGATTGCATCTACTGT | 278 | E53SL1 | GCCAAGCTTGAGTCATGGA |
| | | A | | 1 | AGG |
| 936 | E53S13.de12-Cv5 | TTTGGATTGCATCTACTGT | 279 | E53SL1 | AGCCAAGCTTGAGTCATGG |
| | | A | | 2 | AAG |
| 936 | E53S13.del2-Cv5 | TTTGGATTGCATCTACTGT | 280 | E53SL1 | CAGAGCCAAGCTTGAGTCA |
| | | A | | 3 | TGG |
| 936 | E53S13.del2-Cv5 | TTTGGATTGCATCTACTGT | 281 | E53SL1 | AGGCCAGAGCCAAGCTTGA |
| | | A | | 4 | GTC |
| 936 | E53S13.de12-Cv5 | TTTGGATTGCATCTACTGT | 282 | E53SL1 | AGAAGCTGAGCAGGTCT TA |
| | | A | | 5 | GGA |
| 936 | E53S13.del2-Cv5 | TTTGGATTGCATCTACTGT | 283 | E53SL1 | AAGGAAGAAGCTGAGCAGG |
| | | A | | 6 | TCT |
| 936 | E53S13.del2-Cv5 | TTTGGATTGCATCTACTGT | 284 | E53SL1 | GGAAGCTAAGGAAGAAGCT |
| | | A | | 7 | GAG |
| 936 | E53S13.del2-Cv5 | TTTGGATTGCATCTACTGT | 285 | E53SL1 | TTCAACACAATGGCTGGAA |
| | | A | | 8 | GCT |
| 936 | E53S13.de12-Cv5 | TTTGGATTGCATCTACTGT | 286 | E53SL1 | GTTAAAGGATTCAACACAA |
| | | A | | 9 | TGG |
| 936 | E53S13.de12-Cv5 | TTTGGATTGCATCTACTGT | 287 | E53SL2 | AAATGTTAAAGGATTCAAC |
| | | A | | 0 | ACA |
| 936 | E53S13.del2-Cv5 | TTTGGATTGCATCTACTGT | 288 | E53SL2 | GCAACAGTTGAATGAAATG |
| | | A | | 1 | TTA |
| 936 | E53S13 del2-Cv5 | TTTGGATTGCATCTACTGT | 289 | E53SL2 | TACAAGAACACCTTCAGAA |
| | | A | | 2 | CCG |
| 936 | E53S13.del2-Cv5 | TTTGGATTGCATCTACTGT | 290 | E53SL2 | AAGTACAAGAACACCTTCA |
| | | A | | 3 | GAA |
| 936 | E53S13.del2-Cv5 | TTTGGATTGCATCTACTGT | 291 | E53SL2 | AGTTGAAAGAATTCAGAAT |
| | | A | | 4 | CAG |
| 936 | E53S13.de12-Cv5 | TTTGGATTGCATCTACTGT | 292 | E53SL2 | TAGTTGAAAGAATTCAGAA |
| | | A | | 5 | TCA |
| 937 | E53S13.delT-Cv5 | CTTTGGATTGCATCTACTG | 272 | E53SL4 | TTTTGGATTGCATCTACTG |
| | | TA | | | TAT |
| 937 | E53S13.delT-Cv5 | CTTTGGATTGCATCTACTG | 273 | E53SL5 | ACCCTCCTTCCATGACTCA |
| | | TA | | | AGC |
| 937 | E53S13.delT-Cv5 | CTTTGGATTGCATCTACTG | 274 | E53SL6 | CTTCCATGACTCAAGCTTG |
| | | TA | | | GCT |
| 937 | E53S13.delT-Cv5 | CTTTGGATTGCATCTACTG | 275 | E53SL7 | ACATTTCATTCAACTGTTG |
| | | TA | | | CCT |
| 937 | E53S13.delT-Cv5 | CTTTGGATTGCATCTACTG | 276 | E53SL8 | TCAACTGTTGCCTCCGGTT |
| | | TA | | | CTG |
| 937 | E53S13.delT-Cv5 | CTTTGGATTGCATCTACTG | 277 | E53SL1 | CCAAAAGAAAATCACAGAA |
| | | TA | | 0 | ACC |
| 937 | E53S13.delT-Cv5 | CTTTGGATTGCATCTACTG | 278 | E53SL1 | GCCAAGCTTGAGTCATGGA |
| | | TA | | 1 | AGG |
| 937 | E53S13.delT-Cv5 | CTTTGGATTGCATCTACTG | 279 | E53SL1 | AGCCAAGCTTGAGTCATGG |
| | | TA | | 2 | AAG |
| 937 | E53S13.delT-Cv5 | CTTTGGATTGCATCTACTG | 280 | E53SL1 | CAGAGCCAAGCTTGAGTCA |
| | | TA | | 3 | TGG |
| 937 | E53S13.delT-Cv5 | CTTTGGATTGCATCTACTG | 281 | E53SL1 | AGGCCAGAGCCAAGCTTGA |
| | | TA | | 4 | GTC |
| 937 | E53S13.delT-Cv5 | CTTTGGATTGCATCTACTG | 282 | E53SL1 | AGAAGCTGAGCAGGTCTTA |
| | | TA | | 5 | GGA |
| 937 | E53S13.delT-Cv5 | CTTTGGATTGCATCTACTG | 283 | E53SL1 | AAGGAAGAAGCTGAGCAGG |
| | | TA | | 6 | TCT |
| 937 | E53S13.delT-Cv5 | CTTTGGATTGCATCTACTG | 284 | E53SL1 | GGAAGCTAAGGAAGAAGCT |
| | | TA | | 7 | GAG |
| 937 | E53S13.delT-Cv5 | CTTTGGATTGCATCTACTG | 285 | E53SL1 | TTCAACACAATGGCTGGAA |
| | | TA | | 8 | GCT |
| 937 | E53S13.delT-Cv5 | CTTTGGATTGCATCTACTG | 286 | E53SL1 | GTTAAAGGATTCAACACAA |
| | | TA | | 9 | TGG |
| 937 | E53S13.delT-Cv5 | CTTTGGATTGCATCTACTG | 287 | E53SL2 | AAATGTTAAAGGATTCAAC |
| | | TA | | 0 | ACA |
| 937 | E53S13.delT-Cv5 | CTTTGGATTGCATCTACTG | 288 | E53SL2 | GCAACAGTTGAATGAAATG |
| | | TA | | 1 | TTA |
| 937 | E53S13.delT-Cv5 | CTTTGGATTGCATCTACTG | 289 | E53SL2 | TACAAGAACACCTTCAGAA |
| | | TA | | 2 | CCG |
| 937 | E53S13.delT-Cv5 | CTTTGGATTGCATCTACTG | 290 | E53SL2 | AAGTACAAGAACACCTTCA |
| | | TA | | 3 | GAA |
| 937 | E53S13.delT-Cv5 | CTTTGGATTGCATCTACTG | 291 | E53SL2 | AGTTGAAAGAATTCAGAAT |
| | | TA | | 4 | CAG |
| 937 | E53S13.delT-Cv5 | CTTTGGATTGCATCTACTG | 292 | E53SL2 | TAGTTGAAAGAATTCAGAA |
| | | TA | | 5 | TCA |
| 938 | E53S13.delT + A.- | ACTTTGGATTGCATCTACT | 272 | E53SL4 | TTTTGGATTGCATCTACTG |
| | Cv5 | GTA | | | TAT |
| 938 | E53S13.delT + A.- | ACTTTGGATTGCATCTACT | 273 | E53SL5 | ACCCTCCTTCCATGACTCA |
| | Cv5 | GTA | | | AGC |
| 938 | E53S13.delT + A.- | ACTTTGGATTGCATCTACT | 274 | E53SL6 | CTTCCATGACTCAAGCTTG |
| | Cv5 | GTA | | | GCT |
| 938 | E53S13.delT + A.- | ACTTTGGATTGCATCTACT | 275 | E53SL7 | ACATTTCATTCAACTGTTG |
| | Cv5 | GTA | | | CCT |
| 938 | E53S13.delT + A.- | ACTTTGGATTGCATCTACT | 276 | E53SL8 | TCAACTGTTGCCTCCGGTT |
| | Cv5 | GTA | | | CTG |
| 938 | E53S13.delT + A.- | ACTTTGGATTGCATCTACT | 277 | E53SL1 | CCAAAAGAAAATCACAGAA |
| | Cv5 | GTA | | 0 | ACC |
| 938 | E53S13.delT + A.- | ACTTTGGATTGCATCTACT | 278 | E53SL1 | GCCAAGCTTGAGTCATGGA |
| | Cv5 | GTA | | 1 | AGG |
| 938 | E53S13.delT + A.- | ACTTTGGATTGCATCTACT | 279 | E53SL1 | AGCCAAGCTTGAGTCATGG |
| | Cv5 | GTA | | 2 | AAG |
| 938 | E53S13.delT + A.- | ACTTTGGATTGCATCTACT | 280 | E53SL1 | CAGAGCCAAGCTTGAGTCA |
| | Cv5 | GTA | | 3 | TGG |
| 938 | E53S13.delT + A.- | ACTTTGGATTGCATCTACT | 281 | E53SL1 | AGGCCAGAGCCAAGCTTGA |
| | Cv5 | GTA | | 4 | GTC |
| 938 | E53S13.delT + A.- | ACTTTGGATTGCATCTACT | 282 | E53SL1 | AGAAGCTGAGCAGGTCTTA |
| | Cv5 | GTA | | 5 | GGA |
| 938 | E53S13.delT + A.- | ACTTTGGATTGCATCTACT | 283 | E53SL1 | AAGGAAGAAGCTGAGCAGG |
| | Cv5 | GTA | | 6 | TCT |
| 938 | E53S13.delT + A.- | ACTTTGGATTGCATCTACT | 284 | E53SL1 | GGAAGCTAAGGAAGAAGCT |
| | Cv5 | GTA | | 7 | GAG |
| 938 | E53S13.delT + A.- | ACTTTGGATTGCATCTACT | 285 | E53SL1 | TTCAACACAATGGCTGGAA |
| | Cv5 | GTA | | 8 | GCT |
| 938 | E53S13.delT + A.- | ACTTTGGATTGCATCTACT | 286 | E53SL1 | GTTAAAGGATTCAACACAA |
| | Cv5 | GTA | | 9 | TGG |
| 938 | E53S13.delT + A.- | ACTTTGGATTGCATCTACT | 287 | E53SL2 | AAATGTTAAAGGATTCAAC |
| | Cv5 | GTA | | 0 | ACA |
| 938 | E53S13.delT + A.- | ACTTTGGATTGCATCTACT | 288 | E53SL2 | GCAACAGTTGAATGAAATG |
| | Cv5 | GTA | | 1 | TTA |
| 938 | E53S13.delT + A.- | ACTTTGGATTGCATCTACT | 289 | E53SL2 | TACAAGAACACCTTCAGAA |
| | Cv5 | GTA | | 2 | CCG |
| 938 | E53S13.delT + A.- | ACTTTGGATTGCATCTACT | 290 | E53SL2 | AAGTACAAGAACACCTTCA |
| | Cv5 | GTA | | 3 | GAA |
| 938 | E53S13.delT + A.- | ACTTTGGATTGCATCTACT | 291 | E53SL2 | AGTTGAAAGAATTCAGAAT |
| | Cv5 | GTA | | 4 | CAG |
| 938 | E53S13.delT + A.- | ACTTTGGATTGCATCTACT | 292 | E53SL2 | TAGTTGAAAGAATTCAGAA |
| | Cv5 | GTA | | 5 | TCA |
| 950 | E53SL3-21 | TTTTGGATTGCATCTACTG | 275 | E53SL7 | ACATTTCATTCAACTGTTG |
| | | TA | | | CCT |
| 951 | E53SL3-20 | TTTGGATTGCATCTACTGT | 275 | E53SL7 | ACATTTCATTCAACTGTTG |
| | | A | | | CCT |
| 952 | E53SL3-19 | TTGGATTGCATCTACTGTA | 275 | E53SL7 | ACATTTCATTCAACTGTTG |
| | | | | | CCT |
| 953 | E53SL3-18 | TGGATTGCATCTACTGTA | 275 | E53SL7 | ACATTTCATTCAACTGTTG |
| | | | | | CCT |
| 954 | E53SL3-17 | GGATTGCATCTACTGTA | 275 | E53SL7 | ACATTTCATTCAACTGTTG |
| | | | | | CCT |
| 955 | E53SL3-16 | GATTGCATCTACTGTA | 275 | E53SL7 | ACATTTCATTCAACTGTTG |
| | | | | | CCT |

TABLE 6
f) All guide sequences (human-hg38.12)

| Seq ID | Guide RNA Name or Guide ID | | | | | |
|---|---|---|---|---|---|---|
| No. | name | exon_id | enzyme | strand | Guide Sequence | pam |
| 1 | E44Sa1 | 44 | SaCas9 | + | ATTTAGCATGTTCCCAATT | AGGAA |
| | | | | | CTC | T |
| 2 | E44Sa3 | 44 | SaCas9 | − | TCTCAGAAAGACACAAATT | GAGAA |
| | | | | | CCT | T |
| 3 | E45Sa1 | 45 | SaCas9 | + | TCAGGCTTCCCAATTTTTC | TAGAA |
| | | | | | CTG | T |
| 4 | E45Sa2 | 45 | SaCas9 | + | TAGAATACTGGCATCTGTT | GAGGA |
| | | | | | TTT | T |
| 5 | E45Sa3 | 45 | SaCas9 | + | TGGCATCTGTTTTTGAGGA | CTGAA |
| | | | | | TTG | T |
| 6 | E45Sa4 | 45 | SaCas9 | + | TTGCCGCTGCCCAATGCCA | TGGAG |
| | | | | | TCC | T |
| 7 | E45Sa6 | 45 | SaCas9 | − | TCTACAGGAAAAATTGGGA | CTGAA |
| | | | | | AGC | T |
| 8 | E45Sa7 | 45 | SaCas9 | − | GCGGCAAACTGTTGTCAGA | TTGAA |
| | | | | | ACA | T |
| 9 | E45Sa8 | 45 | SaCas9 | − | TTTTGGTATCTTACAGGAA | CAGGA |
| | | | | | CTC | T |
| 10 | E50Sa2 | 50 | SaCas9 | − | AGGAAGTTAGAAGATCTGA | CTGAG |
| | | | | | GCT | T |
| 11 | E51Sa1 | 51 | SaCas9 | + | TAGTAACCACAGGTTGTGT | CAGAG |
| | | | | | CAC | T |
| 12 | E51Sa2 | 51 | SaCas9 | + | GTTGTGTCACCAGAGTAAC | CTGAG |
| | | | | | AGT | T |
| 13 | E51 Sa4 | 51 | SaCas9 | − | GAGGGTGATGGTGGGTGAC | GAGGA |
| | | | | | CTT | T |
| 14 | E51Sa5 | 51 | SaCas9 | − | TATAAAATCACAGAGGGTG | GTGGG |
| | | | | | ATG | T |
| 15 | E51Sa6 | 51 | SaCas9 | − | TTGATCAAGTTATAAAATC | GAGGG |
| | | | | | ACA | T |
| 16 | E53Sa1 | 53 | SaCas9 | + | CCTTGGTTTCTGTGATTTT | TTGGA |
| | | | | | CTT | T |
| 17 | E53Sa2 | 53 | SaCas9 | + | TCCTTAGCTTCCAGCCATT | TTGAA |
| | | | | | GTG | T |
| 18 | E53Sa3 | 53 | SaCas9 | + | CTTGTACTTCATCCCACTG | CTGAA |
| | | | | | ATT | T |
| 19 | E53Sa4 | 53 | SaCas9 | + | ACTGATTCTGAATTCTTTC | TAGAA |
| | | | | | AAC | T |
| 20 | E53Sa5 | 53 | SaCas9 | − | AGCCAAGCTTGAGTCATGG | GAGGG |
| | | | | | AAG | T |
| 21 | E53Sa6 | 53 | SaCas9 | − | TTAGGACAGGCCAGAGCCA | TTGAG |
| | | | | | AGC | T |
| 22 | E53Sa7 | 53 | SaCas9 | − | GCAACAGTTGAATGAAATG | AAGGA |
| | | | | | TTA | T |
| 23 | E53Sa8 | 53 | SaCas9 | − | CCTTCAGAACCGGAGGCAA | TTGAA |
| | | | | | CAG | T |
| 24 | E53Sa9 | 53 | SaCas9 | − | AGTTGAAAGAATTCAGAAT | TGGGA |
| | | | | | CAG | T |
| 25 | E53Sa10 | 53 | SaCas9 | − | TTTTATTCTAGTTGAAAGA | CAGAA |
| | | | | | ATT | T |
| 26 | E53Sa11 | 53 | SaCas9 | − | TTTTTCCTTTTATTCTAGT | AAGAA |
| | | | | | TGA | T |
| 27 | E51SaCas9KKH1 | 51 | SACAS9 | + | TCATTTTTTCTCATACCTT | CTTGA |
| | | | KKH | | CTG | T |
| 28 | E51SaCas9KKH2 | 51 | SACAS9 | + | TTTTTTCTCATACCTTCTG | GATGA |
| | | | KKH | | CTT | T |
| 29 | E51SaCas9KKH3 | 51 | SACAS9 | + | CCTTCTGCTTGATGATCAT | GTTGA |
| | | | KKH | | CTC | T |
| 30 | E51SaCas9KKH4 | 51 | SACAS9 | + | ATGATCATCTCGTTGATAT | CAAGG |
| | | | KKH | | CCT | T |
| 31 | E51SaCas9KKH5 | 51 | SACAS9 | + | AAGGTCACCCACCATCACC | TGTGA |
| | | | KKH | | CTC | T |
| 32 | E51SaCas9KKH6 | 51 | SACAS9 | + | ATCACCCTCTGTGATTTTA | CTTGA |
| | | | KKH | | TAA | T |
| 33 | E51SaCas9KKH7 | 51 | SACAS9 | + | ATAACTTGATCAAGCAGAG | GCCAG |
| | | | KKH | | AAA | T |
| 34 | E51SaCas9KKH8 | 51 | SACAS9 | + | CTTGATCAAGCAGAGAAAG | GTCGG |
| | | | KKH | | CCA | T |
| 35 | E51SaCas9KKH9 | 51 | SACAS9 | + | ATCAAGCAGAGAAAGCCAG | GTAAG |
| | | | KKH | | TCG | T |
| 36 | E51SaCas9KKH10 | 51 | SACAS9 | + | CAGTCGGTAAGTTCTGTCC | CCCGG |
| | | | KKH | | AAG | T |
| 37 | E51SaCas9KKH11 | 51 | SACAS9 | + | GTAAGTTCTGTCCAAGCCC | TGAAA |
| | | | KKH | | GGT | T |
| 38 | E51SaCas9KKH12 | 51 | SACAS9 | + | AGCCCGGTTGAAATCTGCC | GCAGG |
| | | | KKH | | AGA | T |
| 39 | E51SaCas9KKH13 | 51 | SACAS9 | + | AGCAGGTACCTCCAACATC | GAAGA |
| | | | KKH | | AAG | T |
| 40 | E51SaCas9KKH14 | 51 | SACAS9 | + | CAACATCAAGGAAGATGGC | TCTAG |
| | | | KKH | | ATT | T |
| 41 | E51SaCas9KKH15 | 51 | SACAS9 | + | AGGAAGATGGCATTTCTAG | GGAGA |
| | | | KKH | | TTT | T |
| 42 | E51SaCas9KKH16 | 51 | SACAS9 | + | ATGGCATTTCTAGTTTGGA | GGCAG |
| | | | KKH | | GAT | T |
| 43 | E51SaCas9KKH17 | 51 | SACAS9 | + | CTAGTTTGGAGATGGCAGT | CTTAG |
| | | | KKH | | TTC | T |
| 44 | E51SaCas9KKH18 | 51 | SACAS9 | + | GATGGCAGTTTCCTTAGTA | ACAGG |
| | | | KKH | | ACC | T |
| 45 | E51SaCas9KKH19 | 51 | SACAS9 | + | TAGTAACCACAGGTTGTGT | CAGAG |
| | | | KKH | | CAC | T |
| 46 | E51SaCas9KKH20 | 51 | SACAS9 | + | CCACAGGTTGTGTCACCAG | AACAG |
| | | | KKH | | AGT | T |
| 47 | E51SaCas9KKH21 | 51 | SACAS9 | + | GTTGTGTCACCAGAGTAAC | CTGAG |
| | | | KKH | | AGT | T |
| 48 | E51SaCas9KKH22 | 51 | SACAS9 | + | GAGTAACAGTCTGAGTAGG | TAAAA |
| | | | KKH | | AGC | T |
| 49 | E51SaCas9KKH23 | 51 | SACAS9 | + | TCTGAGTAGGAGCTAAAAT | TTGGG |
| | | | KKH | | ATT | T |
| 50 | E51SaCas9KKH24 | 51 | SACAS9 | − | AGAAGGTATGAGAAAAAAT | AAAAG |
| | | | KKH | | GAT | T |
| 51 | E51SaCas9KKH25 | 51 | SACAS9 | − | TCAAGCAGAAGGTATGAGA | AATGA |
| | | | KKH | | AAA | T |
| 52 | E51SaCas9KKH26 | 51 | SACAS9 | − | TCATCAAGCAGAAGGTATG | AAAAA |
| | | | KKH | | AGA | T |
| 53 | E51SaCas9KKH27 | 51 | SACAS9 | − | TCAACGAGATGATCATCAA | GAAGG |
| | | | KKH | | GCA | T |
| 54 | E51SaCas9KKH28 | 51 | SACAS9 | − | GTGACCTTGAGGATATCAA | GATGA |
| | | | KKH | | CGA | T |
| 55 | E51SaCas9KKH29 | 51 | SACAS9 | − | TGGGTGACCTTGAGGATAT | CGAGA |
| | | | KKH | | CAA | T |
| 56 | E51SaCas9KKH30 | 51 | SACAS9 | − | GAGGGTGATGGTGGGTGAC | GAGGA |
| | | | KKH | | CTT | T |
| 57 | E51SaCas9KKH31 | 51 | SACAS9 | − | TATAAAATCACAGAGGGTG | GTGGG |
| | | | KKH | | ATG | T |
| 58 | E51SaCas9KKH32 | 51 | SACAS9 | − | AAGTTATAAAATCACAGAG | GATGG |
| | | | KKH | | GGT | T |
| 59 | E51SaCas9KKH33 | 51 | SACAS9 | − | ATCAAGTTATAAAATCACA | GGTGA |
| | | | KKH | | GAG | T |
| 60 | E51SaCas9KKH34 | 51 | SACAS9 | − | TTGATCAAGTTATAAAATC | GAGGG |
| | | | KKH | | ACA | T |
| 61 | E51SaCas9KKH35 | 51 | SACAS9 | − | CTTTCTCTGCTTGATCAAG | TAAAA |
| | | | KKH | | TTA | T |
| 62 | E51SaCas9KKH36 | 51 | SACAS9 | − | CCGACTGGCTTTCTCTGCT | TCAAG |
| | | | KKH | | TGA | T |
| 63 | E51SaCas9KKH37 | 51 | SACAS9 | − | ACTTACCGACTGGCTTTCT | CTTGA |
| | | | KKH | | CTG | T |
| 64 | E51SaCas9KKH38 | 51 | SACAS9 | − | GATGTTGGAGGTACCTGCT | GCAGA |
| | | | KKH | | CTG | T |
| 65 | E51SaCas9KKH39 | 51 | SACAS9 | − | AAATGCCATCTTCCTTGAT | GGAGG |
| | | | KKH | | GTT | T |
| 66 | E51SaCas9KKH40 | 51 | SACAS9 | − | CCAAACTAGAAATGCCATC | CTTGA |
| | | | KKH | | TTC | T |
| 67 | E51SaCas9KKH41 | 51 | SACAS9 | − | AGGAAACTGCCATCTCCAA | AGAAA |
| | | | KKH | | ACT | T |
| 68 | E51SaCas9KKH42 | 51 | SACAS9 | − | CTGTTACTCTGGTGACACA | TGTGG |
| | | | KKH | | ACC | T |
| 69 | E51SaCas9KKH43 | 51 | SACAS9 | − | TAGCTCCTACTCAGACTGT | TCTGG |
| | | | KKH | | TAC | T |
| 70 | E53SaCas9KKH1 | 53 | SACAS9 | + | AAAAGGTATCTTTGATACT | CTTGG |
| | | | KKH | | AAC | T |
| 71 | E53SaCas9KKH2 | 53 | SACAS9 | + | CTTTGATACTAACCTTGGT | TGTGA |
| | | | KKH | | TTC | T |
| 72 | E53SaCas9KKH3 | 53 | SACAS9 | + | CCTTGGTTTCTGTGATTTT | TTGGA |
| | | | KKH | | CTT | T |
| 73 | E53SaCas9KKH4 | 53 | SACAS9 | + | TCCTTAGCTTCCAGCCATT | TTGAA |
| | | | KKH | | GTG | T |
| 74 | E53SaCas9KKH5 | 53 | SACAS9 | + | AACATTTCATTCAACTGTT | TCCGG |
| | | | KKH | | GCC | T |
| 75 | E53SaCas9KKH6 | 53 | SACAS9 | + | TTCAACTGTTGCCTCCGGT | GAAGG |
| | | | KKH | | TCT | T |
| 76 | E53SaCas9KKH7 | 53 | SACAS9 | + | AGGTGTTCTTGTACTTCAT | ACTGA |
| | | | KKH | | CCC | T |
| 77 | E53SaCas9KKH8 | 53 | SACAS9 | + | CTTGTACTTCATCCCACTG | CTGAA |
| | | | KKH | | ATT | T |
| 78 | E53SaCas9KKH9 | 53 | SACAS9 | + | ACTGATTCTGAATTCTTTC | TAGAA |
| | | | KKH | | AAC | T |
| 79 | E53SaCas9KKH10 | 53 | SACAS9 | + | TTCTTTCAACTAGAATAAA | AAAAA |
| | | | KKH | | AGG | T |
| 80 | E53SaCas9KKH11 | 53 | SACAS9 | + | TTCAACTAGAATAAAAGGA | ATAAA |
| | | | KKH | | AAA | T |
| 81 | E53SaCas9KKH12 | 53 | SACAS9 | + | AGAATAAAAGGAAAAATAA | TATAG |
| | | | KKH | | ATA | T |
| 82 | E53SaCas9KKH13 | 53 | SACAS9 | − | GTTAGTATCAAAGATACCT | TAAAA |
| | | | KKH | | TTT | T |
| 83 | E53SaCas9KKH14 | 53 | SACAS9 | − | CACAGAAACCAAGGTTAGT | AAAGA |
| | | | KKH | | ATC | T |
| 84 | E53SaCas9KKH15 | 53 | SACAS9 | − | AAAGAAAATCACAGAAACC | GTTAG |
| | | | KKH | | AAG | T |
| 85 | E53SaCas9KKH16 | 53 | SACAS9 | − | TCCAAAAGAAAATCACAGA | CAAGG |
| | | | KKH | | AAC | T |
| 86 | E53SaCas9KKH17 | 53 | SACAS9 | − | ATACAGTAGATGCAATCCA | GAAAA |
| | | | KKH | | AAA | T |
| 87 | E53SaCas9KKH18 | 53 | SACAS9 | − | AGGAGGGTCCCTATACAGT | TGCAA |
| | | | KKH | | AGA | T |
| 88 | E53SaCas9KKH19 | 53 | SACAS9 | − | ATGGAAGGAGGGTCCCTAT | GTAGA |
| | | | KKH | | ACA | T |
| 89 | E53SaCas9KKH20 | 53 | SACAS9 | − | AGTCATGGAAGGAGGGTCC | TACAG |
| | | | KKH | | CTA | T |
| 90 | E53SaCas9KKH21 | 53 | SACAS9 | − | AGCCAAGCTTGAGTCATGG | GAGGG |
| | | | KKH | | AAG | T |
| 91 | E53SaCas9KKH22 | 53 | SACAS9 | − | TTAGGACAGGCCAGAGCCA | TTGAG |
| | | | KKH | | AGC | T |
| 92 | E53SaCas9KKH23 | 53 | SACAS9 | − | TGGAAGCTAAGGAAGAAGC | GCAGG |
| | | | KKH | | TGA | T |
| 93 | E53SaCas9KKH24 | 53 | SACAS9 | − | AATGAAATGTTAAAGGATT | CACAA |
| | | | KKH | | CAA | T |
| 94 | E53SaCas9KKH25 | 53 | SACAS9 | − | GCAACAGTTGAATGAAATG | AAGGA |
| | | | KKH | | TTA | T |
| 95 | E53SaCas9KKH26 | 53 | SACAS9 | − | AGAACCGGAGGCAACAGTT | TGAAA |
| | | | KKH | | GAA | T |
| 96 | E53SaCas9KKH27 | 53 | SACAS9 | − | CCTTCAGAACCGGAGGCAA | TTGAA |
| | | | KKH | | CAG | T |
| 97 | E53SaCas9KKH28 | 53 | SACAS9 | − | GAACACCTTCAGAACCGGA | AACAG |
| | | | KKH | | GGC | T |
| 98 | E53SaCas9KKH29 | 53 | SACAS9 | − | AAAGAATTCAGAATCAGTG | TGAAG |
| | | | KKH | | GGA | T |
| 99 | E53SaCas9KKH30 | 53 | SACAS9 | − | AGTTGAAAGAATTCAGAAT | TGGGA |
| | | | KKH | | CAG | T |
| 100 | E53SaCas9KKH31 | 53 | SACAS9 | − | ATTCTAGTTGAAAGAATTC | ATCAG |
| | | | KKH | | AGA | T |
| 101 | E53SaCas9KKH32 | 53 | SACAS9 | − | TTTTATTCTAGTTGAAAGA | CAGAA |
| | | | KKH | | ATT | T |
| 102 | E53SaCas9KKH33 | 53 | SACAS9 | − | TTTTTCCTTTTATTCTAGT | AAGAA |
| | | | KKH | | TGA | T |
| 103 | E53SaCas9KKH34 | 53 | SACAS9 | − | ATATATTTATTTTTCCTTT | TCTAG |
| | | | KKH | | TAT | T |
| 200 | E44Slu1 | 44 | SluCas9 | + | TATTTAGCATGTTCCCAAT | CAGG |
| | | | | | TCT | |
| 201 | E44Slu2 | 44 | SluCas9 | + | AACAGATCTGTCAAATCGC | CAGG |
| | | | | | CTG | |
| 202 | E44Slu4 | 44 | SluCas9 | − | TGCTAAATACAAATGGTAT | AAGG |
| | | | | | CTT | |
| 203 | E44Slu5 | 44 | SluCas9 | − | ATTGGGAACATGCTAAATA | ATGG |
| | | | | | CAA | |
| 204 | E44Slu6 | 44 | SluCas9 | − | AAAGACACAAATTCCTGAG | TGGG |
| | | | | | AAT | |
| 205 | E44Slu7 | 44 | SluCas9 | − | GAAAGACACAAATTCCTGA | TTGG |
| | | | | | GAA | |
| 206 | E44Slu8 | 44 | SluCas9 | − | ATGATATAAAGATATTTAA | GTGG |
| | | | | | TCA | |
| 207 | E44Slu9 | 44 | SluCas9 | − | TTGACAGATCTGTTGAGAA | GCGG |
| | | | | | ATG | |
| 208 | E44Slu10 | 44 | SluCas9 | − | GATTTGACAGATCTGTTGA | ATGG |
| | | | | | GAA | |
| 209 | E45Slu1 | 45 | SluCas9 | + | AGACCTCCTGCCACCGCAG | CAGG |
| | | | | | ATT | |
| 210 | E45Slu2 | 45 | SluCas9 | + | TCCCAATTTTTCCTGTAGA | CTGG |
| | | | | | ATA | |
| 211 | E45Slu3 | 45 | SluCas9 | + | TAGAATACTGGCATCTGTT | GAGG |
| | | | | | TTT | |
| 212 | E45Slu4 | 45 | SluCas9 | + | TTTGCCGCTGCCCAATGCC | CTGG |
| | | | | | ATC | |
| 213 | E45Slu7 | 45 | SluCas9 | − | CTGTCAGACAGAAAAAAGA | AGGG |
| | | | | | GGT | |
| 214 | E45Slu8 | 45 | SluCas9 | − | GCTGTCAGACAGAAAAAAG | TAGG |
| | | | | | AGG | |
| 215 | E45Slu9 | 45 | SluCas9 | − | AACAGCTGTCAGACAGAAA | GAGG |
| | | | | | AAA | |
| 216 | E45Slu10 | 45 | SluCas9 | − | AAGCCTGAATCTGCGGTGG | GAGG |
| | | | | | CAG | |
| 217 | E45Slu11 | 45 | SluCas9 | − | GGGAAGCCTGAATCTGCGG | CAGG |
| | | | | | TGG | |
| 218 | E45Slu12 | 45 | SluCas9 | − | AATTGGGAAGCCTGAATCT | GTGG |
| | | | | | GCG | |
| 219 | E45Slu13 | 45 | SluCas9 | − | AAAAATTGGGAAGCCTGAA | GCGG |
| | | | | | TCT | |
| 220 | E45Slu14 | 45 | SluCas9 | − | GCCAGTATTCTACAGGAAA | TGGG |
| | | | | | AAT | |
| 221 | E45Slu15 | 45 | SluCas9 | − | TGCCAGTATTCTACAGGAA | TTGG |
| | | | | | AAA | |
| 222 | E45Slu16 | 45 | SluCas9 | − | AAAAACAGATGCCAGTATT | CAGG |
| | | | | | CTA | |
| 223 | E45Slu17 | 45 | SluCas9 | − | TGTCAGAACATTGAATGCA | GGGG |
| | | | | | ACT | |
| 224 | E45Slu18 | 45 | SluCas9 | − | TTGTCAGAACATTGAATGC | TGGG |
| | | | | | AAC | |
| 225 | E45Slu19 | 45 | SluCas9 | − | GTTGTCAGAACATTGAATG | CTGG |
| | | | | | CAA | |
| 226 | E45Slu20 | 45 | SluCas9 | − | AACTCCAGGATGGCATTGG | GCGG |
| | | | | | GCA | |
| 227 | E45Slu21 | 45 | SluCas9 | − | TACAGGAACTCCAGGATGG | TGGG |
| | | | | | CAT | |
| 228 | E45Slu22 | 45 | SluCas9 | − | TTACAGGAACTCCAGGATG | TTGG |
| | | | | | GCA | |
| 229 | E45Slu23 | 45 | SluCas9 | − | GGTATCTTACAGGAACTCC | ATGG |
| | | | | | AGG | |
| 230 | E45Slu24 | 45 | SluCas9 | − | TTTTGGTATCTTACAGGAA | CAGG |
| | | | | | CTC | |
| 231 | E50Slu2 | 50 | SluCas9 | + | AGTATACTTACAGGCTCCA | GTGG |
| | | | | | ATA | |
| 232 | E50Slu3 | 50 | SluCas9 | + | CAGGCTCCAATAGTGGTCA | CAGG |
| | | | | | GTC | |
| 233 | E50Slu4 | 50 | SluCas9 | + | CAATAGTGGTCAGTCCAGG | TAGG |
| | | | | | AGC | |
| 234 | E50Slu5 | 50 | SluCas9 | + | GTGGTCAGTCCAGGAGCTA | CAGG |
| | | | | | GGT | |
| 235 | E50Slu6 | 50 | SluCas9 | + | TTGCCCTCAGCTCTTGAAG | ACGG |
| | | | | | TAA | |
| 236 | E50Slu9 | 50 | SluCas9 | − | CTAGCTCCTGGACTGACCA | TTGG |
| | | | | | CTA | |
| 237 | E50Slu10 | 50 | SluCas9 | − | GCAAAGCAGCCTGACCTAG | CTGG |
| | | | | | CTC | |
| 238 | E50Slu11 | 50 | SluCas9 | − | AAACCGTTTACTTCAAGAG | AGGG |
| | | | | | CTG | |
| 239 | E50Slu12 | 50 | SluCas9 | − | TAAACCGTTTACTTCAAGA | GAGG |
| | | | | | GCT | |
| 240 | E50Slu13 | 50 | SluCas9 | − | AGATCTGAGCTCTGAGTGG | GCGG |
| | | | | | AAG | |
| 241 | E50Slu14 | 50 | SluCas9 | − | AGAAGATCTGAGCTCTGAG | AAGG |
| | | | | | TGG | |
| 242 | E50Slu15 | 50 | SluCas9 | − | AGTTAGAAGATCTGAGCTC | GTGG |
| | | | | | TGA | |
| 243 | E51Slu1 | 51 | SluCas9 | + | TGATCATCTCGTTGATATC | AAGG |
| | | | | | CTC | |
| 244 | E51Slu2 | 51 | SluCas9 | + | TTGATCAAGCAGAGAAAGC | TCGG |
| | | | | | CAG | |
| 245 | E51Slu3 | 51 | SluCas9 | + | AGTCGGTAAGTTCTGTCCA | CCGG |
| | | | | | AGC | |
| 246 | E51Slu4 | 51 | SluCas9 | + | GCCCGGTTGAAATCTGCCA | CAGG |
| | | | | | GAG | |
| 247 | E51Slu5 | 51 | SluCas9 | + | CAGAGCAGGTACCTCCAAC | AAGG |
| | | | | | ATC | |
| 248 | E51Slu6 | 51 | SluCas9 | + | GGTACCTCCAACATCAAGG | ATGG |
| | | | | | AAG | |
| 249 | E51Slu7 | 51 | SluCas9 | + | CAAGGAAGATGGCATTTCT | TTGG |
| | | | | | AGT | |
| 250 | E51Slu8 | 51 | SluCas9 | + | AGATGGCATTTCTAGTTTG | ATGG |
| | | | | | GAG | |
| 251 | E51Slu9 | 51 | SluCas9 | + | ATGGCAGTTTCCTTAGTAA | CAGG |
| | | | | | CCA | |
| 252 | E51Slu10 | 51 | SluCas9 | + | GTCACCAGAGTAACAGTCT | TAGG |
| | | | | | GAG | |
| 253 | E51Slu15 | 51 | SluCas9 | − | CAACGAGATGATCATCAAG | AAGG |
| | | | | | CAG | |
| 254 | E51Slu16 | 51 | SluCas9 | − | GAGGGTGATGGTGGGTGAC | GAGG |
| | | | | | CTT | |
| 255 | E51Slu17 | 51 | SluCas9 | − | ATAAAATCACAGAGGGTGA | TGGG |
| | | | | | TGG | |
| 256 | E51Slu18 | 51 | SluCas9 | − | TATAAAATCACAGAGGGTG | GTGG |
| | | | | | ATG | |
| 257 | E51Slu19 | 51 | SluCas9 | − | AGTTATAAAATCACAGAGG | ATGG |
| | | | | | GTG | |
| 258 | E51Slu20 | 51 | SluCas9 | − | TGATCAAGTTATAAAATCA | AGGG |
| | | | | | CAG | |
| 259 | E51Slu21 | 51 | SluCas9 | − | TTGATCAAGTTATAAAATC | GAGG |
| | | | | | ACA | |
| 260 | E51Slu22 | 51 | SluCas9 | − | GGGCTTGGACAGAACTTAC | CTGG |
| | | | | | CGA | |
| 261 | E51Slu23 | 51 | SluCas9 | − | CTCTGGCAGATTTCAACCG | TTGG |
| | | | | | GGC | |
| 262 | E51Slu24 | 51 | SluCas9 | − | ACCTGCTCTGGCAGATTTC | CGGG |
| | | | | | AAC | |
| 263 | E51Slu25 | 51 | SluCas9 | − | TACCTGCTCTGGCAGATTT | CCGG |
| | | | | | CAA | |
| 264 | E51Slu26 | 51 | SluCas9 | − | CTTGATGTTGGAGGTACCT | CTGG |
| | | | | | GCT | |
| 265 | E51Slu27 | 51 | SluCas9 | − | AATGCCATCTTCCTTGATG | GAGG |
| | | | | | TTG | |
| 266 | E51Slu28 | 51 | SluCas9 | − | AGAAATGCCATCTTCCTTG | TTGG |
| | | | | | ATG | |
| 267 | E51Slu29 | 51 | SluCas9 | − | GGTGACACAACCTGTGGTT | AAGG |
| | | | | | ACT | |
| 268 | E51Slu30 | 51 | SluCas9 | − | TGTTACTCTGGTGACACAA | GTGG |
| | | | | | CCT | |
| 269 | E51Slu31 | 51 | SluCas9 | − | AGCTCCTACTCAGACTGTT | CTGG |
| | | | | | ACT | |
| 270 | E53Slu2 | 53 | SluCas9 | + | CCTTGGTTTCTGTGATTTT | TTGG |
| | | | | | CTT | |
| 271 | E53Slu3 | 53 | SluCas9 | + | CTTTTGGATTGCATCTACT | TAGG |
| | | | | | GTA | |
| 272 | E53Slu4 | 53 | SluCas9 | + | TTTTGGATTGCATCTACTG | AGGG |
| | | | | | TAT | |
| 273 | E53Slu5 | 53 | SluCas9 | + | ACCCTCCTTCCATGACTCA | TTGG |
| | | | | | AGC | |
| 274 | E53Slu6 | 53 | SluCas9 | + | CTTCCATGACTCAAGCTTG | CTGG |
| | | | | | GCT | |
| 275 | E53Slu7 | 53 | SluCas9 | + | ACATTTCATTCAACTGTTG | CCGG |
| | | | | | CCT | |
| 276 | E53Slu8 | 53 | SluCas9 | + | TCAACTGTTGCCTCCGGTT | AAGG |
| | | | | | CTG | |
| 277 | E53Slu10 | 53 | SluCas9 | − | CCAAAAGAAAATCACAGAA | AAGG |
| | | | | | ACC | |
| 278 | E53Slu11 | 53 | SluCas9 | − | GCCAAGCTTGAGTCATGGA | AGGG |
| | | | | | AGG | |
| 279 | E53Slu12 | 53 | SluCas9 | − | AGCCAAGCTTGAGTCATGG | GAGG |
| | | | | | AAG | |
| 280 | E53Slu13 | 53 | SluCas9 | − | CAGAGCCAAGCTTGAGTCA | AAGG |
| | | | | | TGG | |
| 281 | E53Slu14 | 53 | SluCas9 | − | AGGCCAGAGCCAAGCTTGA | ATGG |
| | | | | | GTC | |
| 282 | E53Slu15 | 53 | SluCas9 | − | AGAAGCTGAGCAGGTCTTA | CAGG |
| | | | | | GGA | |
| 283 | E53Slu16 | 53 | SluCas9 | − | AAGGAAGAAGCTGAGCAGG | TAGG |
| | | | | | TCT | |
| 284 | E53Slu17 | 53 | SluCas9 | − | GGAAGCTAAGGAAGAAGCT | CAGG |
| | | | | | GAG | |
| 285 | E53Slu18 | 53 | SluCas9 | − | TTCAACACAATGGCTGGAA | AAGG |
| | | | | | GCT | |
| 286 | E53Slu19 | 53 | SluCas9 | − | GTTAAAGGATTCAACACAA | CTGG |
| | | | | | TGG | |
| 287 | E53Slu20 | 53 | SluCas9 | − | AAATGTTAAAGGATTCAAC | ATGG |
| | | | | | ACA | |
| 288 | E53Slu21 | 53 | SluCas9 | − | GCAACAGTTGAATGAAATG | AAGG |
| | | | | | TTA | |
| 289 | E53Slu22 | 53 | SluCas9 | − | TACAAGAACACCTTCAGAA | GAGG |
| | | | | | CCG | |
| 290 | E53Slu23 | 53 | SluCas9 | − | AAGTACAAGAACACCTTCA | CCGG |
| | | | | | GAA | |
| 291 | E53Slu24 | 53 | SluCas9 | − | AGTTGAAAGAATTCAGAAT | TGGG |
| | | | | | CAG | |
| 292 | E53Slu25 | 53 | SluCas9 | − | TAGTTGAAAGAATTCAGAA | GTGG |
| | | | | | TCA | |
| 104 | E44SaCas9KKH2 | 44 | SaCas9 | + | TACCATTTGTATTTAGCAT | CCCAA |
| | | | KKH | | GTT | T |
| 105 | E44SaCas9KKH3 | 44 | SaCas9 | + | ATTTAGCATGTTCCCAATT | AGGAA |
| | | | KKH | | CTC | T |
| 106 | E44SaCas9KKH4 | 44 | SaCas9 | + | AACTGTTCAGCTTCTGTTA | ACTGA |
| | | | KKH | | GCC | T |
| 107 | E44SaCas9KKH5 | 44 | SaCas9 | + | TTCAGCTTCTGTTAGCCAC | TTAAA |
| | | | KKH | | TGA | T |
| 108 | E44SaCas9KKH6 | 44 | SaCas9 | + | CACTGATTAAATATCTTTA | CATAA |
| | | | KKH | | TAT | T |
| 109 | E44SaCas9KKH7 | 44 | SaCas9 | + | ATGAAAACGCCGCCATTTC | ACAGA |
| | | | KKH | | TCA | T |
| 110 | E44SaCas9KKH8 | 44 | SaCas9 | + | CCGCCATTTCTCAACAGAT | TCAAA |
| | | | KKH | | CTG | T |
| 111 | E44SaCas9KKH9 | 44 | SaCas9 | + | CAACAGATCTGTCAAATCG | GCAGG |
| | | | KKH | | CCT | T |
| 112 | E44SaCas9KKH14 | 44 | SaCas9 | − | TAAATACAAATGGTATCTT | GTAAG |
| | | | KKH | | AAG | T |
| 113 | E44SaCas9KKH15 | 44 | SaCas9 | − | ATGCTAAATACAAATGGTA | TAAGG |
| | | | KKH | | TCT | T |
| 114 | E44SaCas9KKH16 | 44 | SaCas9 | − | AATTGGGAACATGCTAAAT | AATGG |
| | | | KKH | | ACA | T |
| 115 | E44SaCas9KKH17 | 44 | SaCas9 | − | GAGAATTGGGAACATGCTA | ACAAA |
| | | | KKH | | AAT | T |
| 116 | E44SaCas9KKH18 | 44 | SaCas9 | − | ATTCCTGAGAATTGGGAAC | CTAAA |
| | | | KKH | | ATG | T |
| 117 | E44SaCas9KKH19 | 44 | SaCas9 | − | TCTCAGAAAGACACAAATT | GAGAA |
| | | | KKH | | CCT | T |
| 118 | E44SaCas9KKH20 | 44 | SaCas9 | − | CTGAACAGTTTCTCAGAAA | ACAAA |
| | | | KKH | | GAC | T |
| 119 | E44SaCas9KKH21 | 44 | SaCas9 | − | AATCAGTGGCTAACAGAAG | AACAG |
| | | | KKH | | CTG | T |
| 120 | E44SaCas9KKH22 | 44 | SaCas9 | − | CATTATGATATAAAGATAT | ATCAG |
| | | | KKH | | TTA | T |
| 121 | E44SaCas9KKH23 | 44 | SaCas9 | − | TTTTCATTATGATATAAAG | TTTAA |
| | | | KKH | | ATA | T |
| 122 | E44SaCas9KKH24 | 44 | SaCas9 | − | GGCGGCGTTTTCATTATGA | AAAGA |
| | | | KKH | | TAT | T |
| 123 | E44SaCas9KKH25 | 44 | SaCas9 | − | TGAGAAATGGCGGCGTTTT | TATGA |
| | | | KKH | | CAT | T |
| 124 | E44SaCas9KKH26 | 44 | SaCas9 | − | AGGCGATTTGACAGATCTG | AGAAA |
| | | | KKH | | TTG | T |
| 125 | E44SaCas9KKH27 | 44 | SaCas9 | − | GCTTTTACCTGCAGGCGAT | ACAGA |
| | | | KKH | | TTG | T |
| 126 | E45SaCas9KKH1 | 45 | SaCas9 | + | TGTTTGCAGACCTCCTGCC | GCAGA |
| | | | KKH | | ACC | T |
| 127 | E45SaCas9KKH2 | 45 | SaCas9 | + | CTGCCACCGCAGATTCAGG | CCCAA |
| | | | KKH | | CTT | T |
| 128 | E45SaCas9KKH3 | 45 | SaCas9 | + | TCAGGCTTCCCAATTTTTC | TAGAA |
| | | | KKH | | CTG | T |
| 129 | E45SaCas9KKH4 | 45 | SaCas9 | + | TAGAATACTGGCATCTGTT | GAGGA |
| | | | KKH | | TTT | T |
| 130 | E45SaCas9KKH5 | 45 | SaCas9 | 1 | TGGCATCTGTTTTTGAGGA | CTGAA |
| | | | KKH | | TTG | T |
| 131 | E45SaCas9KKH6 | 45 | SaCas9 | + | AGGATTGCTGAATTATTTC | CCCAG |
| | | | KKH | | TTC | T |
| 132 | E45SaCas9KKH7 | 45 | SaCas9 | + | AATTATTTCTTCCCCAGTT | TTCAA |
| | | | KKH | | GCA | T |
| 133 | E45SaCas9KKH8 | 45 | SaCas9 | + | CAGTTGCATTCAATGTTCT | AACAG |
| | | | KKH | | GAC | T |
| 134 | E45SaCas9KKH9 | 45 | SaCas9 | + | TTCTGACAACAGTTTGCCG | CCCAA |
| | | | KKH | | CTG | T |
| 135 | E45SaCas9KKH10 | 45 | SaCas9 | + | TTGCCGCTGCCCAATGCCA | TGGAG |
| | | | KKH | | TCC | T |
| 136 | E45SaCas9KKH16 | 45 | SaCas9 | − | AAACAGCTGTCAGACAGAA | AGAGG |
| | | | KKH | | AAA | T |
| 137 | E45SaCas9KKH17 | 45 | SaCas9 | − | GAAGCCTGAATCTGCGGTG | GGAGG |
| | | | KKH | | GCA | T |
| 138 | E45SaCas9KKH18 | 45 | SaCas9 | − | GAAAAATTGGGAAGCCTGA | TGCGG |
| | | | KKH | | ATC | T |
| 139 | E45SaCas9KKH19 | 45 | SaCas9 | − | TCTACAGGAAAAATTGGGA | CTGAA |
| | | | KKH | | AGC | T |
| 140 | E45SaCas9KKH20 | 45 | SaCas9 | − | ACAGATGCCAGTATTCTAC | AAAAA |
| | | | KKH | | AGG | T |
| 141 | E45SaCas9KKH21 | 45 | SaCas9 | − | TCAGCAATCCTCAAAAACA | GCCAG |
| | | | KKH | | GAT | T |
| 142 | E45SaCas9KKH22 | 45 | SaCas9 | − | AATAATTCAGCAATCCTCA | ACAGA |
| | | | KKH | | AAA | T |
| 143 | E45SaCas9KKH23 | 45 | SaCas9 | − | GCAACTGGGGAAGAAATAA | AGCAA |
| | | | KKH | | TTC | T |
| 144 | E45SaCas9KKH24 | 45 | SaCas9 | − | CATTGAATGCAACTGGGGA | AATAA |
| | | | KKH | | AGA | T |
| 145 | E45SaCas9KKH25 | 45 | SaCas9 | − | GAACATTGAATGCAACTGG | AGAAA |
| | | | KKH | | GGA | T |
| 146 | E45SaCas9KKH26 | 45 | SaCas9 | − | GCGGCAAACTGTTGTCAGA | TTGAA |
| | | | KKH | | ACA | T |
| 147 | E45SaCas9KKH27 | 45 | SaCas9 | − | TTTTGGTATCTTACAGGAA | CAGGA |
| | | | KKH | | CTC | T |
| 148 | E50SaCas9KKH1 | 50 | SaCas9 | + | GGGATCCAGTATACTTACA | TCCAA |
| | | | KKH | | GGC | T |
| 149 | E50SaCas9KKH2 | 50 | SaCas9 | + | ATCCAGTATACTTACAGGC | AATAG |
| | | | KKH | | TCC | T |
| 150 | E50SaCas9KKH3 | 50 | SaCas9 | + | CAGTATACTTACAGGCTCC | AGTGG |
| | | | KKH | | AAT | T |
| 151 | E50SaCas9KKH4 | 50 | SaCas9 | + | ATACTTACAGGCTCCAATA | GTCAG |
| | | | KKH | | GTG | T |
| 152 | E50SaCas9KKH5 | 50 | SaCas9 | + | CCAATAGTGGTCAGTCCAG | CTAGG |
| | | | KKH | | GAG | T |
| 153 | E50SaCas9KKH6 | 50 | SaCas9 | + | AGGCTGCTTTGCCCTCAGC | TGAAG |
| | | | KKH | | TCT | T |
| 154 | E50SaCas9KKH7 | 50 | SaCas9 | + | TTTGCCCTCAGCTCTTGAA | AACGG |
| | | | KKH | | GTA | T |
| 155 | E50SaCas9KKH8 | 50 | SaCas9 | + | TTTACCGCCTTCCACTCAG | TCAGA |
| | | | KKH | | AGC | T |
| 156 | E50SaCas9KKH10 | 50 | SaCas9 | − | GGACTGACCACTATTGGAG | GTAAG |
| | | | KKH | | CCT | T |
| 157 | E50SaCas9KKH11 | 50 | SaCas9 | − | AAGATCTGAGCTCTGAGTG | GGCGG |
| | | | KKH | | GAA | T |
| 158 | E50SaCas9KKH12 | 50 | SaCas9 | − | AGGAAGTTAGAAGATCTGA | CTGAG |
| | | | KKH | | GCT | T |
| 159 | E50SaCas9KKH13 | 50 | SaCas9 | − | TTTTCTGTTAAAGAGGAAG | GAAGA |
| | | | KKH | | TTA | T |
| 924 | E53SL3.1A-Cv5 | 53 | SluCas9 | | CATTTGGATTGCATCTACT | |
| | | | | | GTA | |
| 925 | E53SL3.1C-Cv5 | 53 | SluCas9 | | CCTTTGGATTGCATCTACT | |
| | | | | | GTA | |
| 926 | E53S13.1G-Cv5 | 53 | SluCas9 | | CGTTTGGATTGCATCTACT | |
| | | | | | GTA | |
| 927 | E53S13.2A-Cv5 | 53 | SluCas9 | | CTATTGGATTGCATCTACT | |
| | | | | | GTA | |
| 928 | E53S13.2C-Cv5 | 53 | SluCas9 | | CTCTTGGATTGCATCTACT | |
| | | | | | GTA | |
| 929 | E53S13.2G-Cv5 | 53 | SluCas9 | | CTGTTGGATTGCATCTACT | |
| | | | | | GTA | |
| 930 | E53S13.3A-Cv5 | 53 | SluCas9 | | CTTATGGATTGCATCTACT | |
| | | | | | GTA | |
| 931 | E53S13.3C-Cv5 | 53 | SluCas9 | | CTTCTGGATTGCATCTACT | |
| | | | | | GTA | |
| 932 | E53S13.3G-Cv5 | 53 | SluCas9 | | CTTGTGGATTGCATCTACT | |
| | | | | | GTA | |
| 933 | E53S13.4A-Cv5 | 53 | SluCas9 | | CTTTAGGATTGCATCTACT | |
| | | | | | GTA | |
| 934 | E53S13.4C-Cv5 | 53 | SluCas9 | | CTTTCGGATTGCATCTACT | |
| | | | | | GTA | |
| 935 | E53S13.4G-Cv5 | 53 | SluCas9 | | CTTTGGGATTGCATCTACT | |
| | | | | | GTA | |
| 936 | E53S13.del2-Cv5 | 53 | SluCas9 | | TTTGGATTGCATCTACTGT | |
| | | | | | A | |
| 937 | E53S13.delT-Cv5 | 53 | SluCas9 | | CTTTGGATTGCATCTACTG | |
| | | | | | TA | |
| 938 | E53S13.delT + A.-Cv5 | 53 | SluCas9 | | ACTTTGGATTGCATCTACT | |
| | | | | | GTA | |
| 950 | E53SL3-21 | 53 | SluCas9 | | TTTTGGATTGCATCTACTG | |
| | | | | | TA | |
| 951 | E53SL3-20 | 53 | SluCas9 | | TTTGGATTGCATCTACTGT | |
| | | | | | A | |
| 952 | E53SL3-19 | 53 | SluCas9 | | TTGGATTGCATCTACTGTA | |
| 953 | E53SL3-18 | 53 | SluCas9 | | TGGATTGCATCTACTGTA | |
| 954 | E53SL3-17 | 53 | SluCas9 | | GGATTGCATCTACTGTA | |
| 955 | E53SL3-16 | 53 | SluCas9 | | GATTGCATCTACTGTA | |

### Compositions

[0126] In some embodiments, a composition is provided comprising one or more guide RNAs, or one or more nucleic acids encoding one or more guide RNAs, comprising or consisting of one or more guide sequence of Table 6 (SEQ ID NOs: 1-159 for SaCas9 and 200-292, 924-938, 950- and 955 for SluCas9). Table 6 provides the endonuclease associated with each guide sequence such that for each guide sequence described herein the type of endonuclease to be paired with the guide (for compositions) or used with the guide (for methods/uses) can be determined.

[0127] In some embodiments, a composition is provided comprising one or more guide RNAs, or one or more nucleic acids encoding one or more guide RNAs, wherein the guide RNA comprises at least 16, 17, 18, 19, or 20 contiguous nucleotides of a guide sequence of Table 6, or is at least 70%, at least 75%, at least 80%, at least 85%, or at least 90% identical to a guide sequence comprising at least 16, 17, 18, 19, or 20 nucleotides of a guide sequence of Table 6. In particular embodiments, a composition is provided comprising one or more guide RNAs, or one or more nucleic acids encoding one or more guide RNAs, wherein the guide RNA comprises at least 20 contiguous nucleotides of a guide sequence of Table 6, or is at least 70%, at least 75%, at least 80%, at least 85%, or at least 90% identical to guide sequence comprising at least 20 nucleotides of a guide sequence of Table 6. In other particular embodiments, a composition is provided comprising one or more guide RNAs, or one or more nucleic acids encoding one or more guide RNAs, wherein the guide RNA comprises no more than 16, no more than 17, no more than 18, no more than 19, no more than 20, no more than 21, or no more than 22 contiguous nucleotides of a guide sequence of Table 6, or is at least 70%, at least 75%, at least 80%, at least 85%, or at least 90% identical to guide sequence comprising no more than 16, no more than 17, no more than 18, no more than 19, no more than 20, no more than 21, or no more than 22 contiguous nucleotides of a guide sequence of Table 6.

[0128] In some embodiments, a composition is provided comprising two or more guide RNAs, or nucleic acid encoding two or more guide RNAs, wherein each guide RNA comprises a guide sequence of Table 6, or at least 16, 17, 18, 19, or 20 contiguous nucleotides of a guide sequence of Table 6, or is at least 70%, at least 75%, at least 80%, at least 85%, or at least 90% identical to a guide sequence comprising at least 16, 17, 18, 19, or 20 nucleotides of a guide sequence selected from Table 6. In particular embodiments, a composition is provided comprising two or more guide RNAs, or nucleic acid encoding two or more guide RNAs, wherein each guide RNA comprises at least 20 contiguous nucleotides of a guide sequence of Table 6, or is at least 70%, at least 75%, at least 80%, at least 85%, or at least 90% identical to a guide sequence comprising at least 20 nucleotides of a guide sequence selected from Table 6. In other particular embodiments, a composition is provided comprising two or more guide RNAs, or nucleic acid encoding two or more guide RNAs, wherein at least one of the two or more guide RNAs, optionally each guide RNA, comprises no more than 16, no more than 17, no more than 18, no more than 19, no more than 20, no more than 21, or no more than 22 contiguous nucleotides of a guide sequence of Table 6, or is at least 70%, at least 75%, at least 80%, at least 85%, or at least 90% identical to a guide sequence comprising no more than 16, no more than 17, no more than 18, no more than 19, no more than 20, no more than 21, or no more than 22 nucleotides of a guide sequence selected from Table 6.

[0129] In some embodiments, a composition is provided comprising a pair of guide RNAs, or nucleic acid encoding a pair of guide RNAs, wherein the pair of guide RNAs comprises sequences from any of the pairs disclosed in Tables 1B, 1D, 2B, 2D, 3B, 3D, 4B, 4D, 5B, and 5D. In some embodiments, a composition is provided comprising any of the pairs of guide RNA sequences disclosed in Tables 1B, 1D, 2B, 2D, 3B, 3D, 4B, 4D, 5B, and 5D.

[0130] In some embodiments, a composition is provided comprising one or more nucleic acid molecules, wherein at least one of the molecules comprises nucleic acid encoding: a) a SaCas9 or SluCas9; and b) a first and a second guide RNA comprising a first and a second guide sequence, wherein the first and second guide sequence are selected from any one of the guide sequence pairs of Tables 1B, 1D, 2B, 2D, 3B, 3D, 4B, 4D, 5B, and 5D.

[0131] In some embodiments, a composition is provided comprising two nucleic acid molecules, wherein at least one of the molecules comprises a nucleic acid encoding a first and a second guide RNA comprising a first and a second guide sequence, wherein the first and second guide sequence are selected from any one of the guide sequence pairs of Tables 1B, 1D, 2B, 2D, 3B, 3D, 4B, 4D, 5B, and 5D, optionally wherein the nucleic acid does not comprise a nucleic acid encoding an endonuclease.

[0132] In some embodiments, a composition is provided comprising a pair of guide RNAs, wherein the pair of guide RNAs comprises or consists of any one of the pairs of guide sequences of any one of Tables 1B or 1D for exon 44. In some embodiments, a composition is provided comprising a pair of guide RNAs, or nucleic acid encoding a pair of guide RNAs, wherein the pair of guide RNAs comprises or consists of any one of the pairs of guide sequences of any one of Tables 2B or 2D for exon 45. In some embodiments, a composition is provided comprising a pair of guide RNAs, wherein the pair of guide RNAs comprises or consists of any one of the pairs of guide sequences of any one of Tables 3B or 3D for exon 50. In some embodiments, a composition is provided comprising a pair of guide RNAs, wherein the pair of guide RNAs comprises or consists of any one of the pairs of guide sequences of any one of Tables 4B or 4D for exon 51. In some embodiments, a composition is provided comprising a pair of guide RNAs, wherein the pair of guide RNAs comprises or consists of any one of the pairs of guide sequences of any one of Tables 5B or 5D for exon 53. In some embodiments, a composition is provided comprising one or more nucleic acid molecules encoding a pair of guide RNAs, wherein the pair of guide RNAs comprises or consists of any one of the pairs of guide sequences of any one of Tables 1B or 1D for exon 44. In some embodiments, a composition is provided comprising one or more nucleic acid molecules encoding a pair of guide RNAs, wherein the pair of guide RNAs comprises or consists of any one of the pairs of guide sequences of any one of Tables 2B or 2D for exon 45. In some embodiments, a composition is provided comprising one or more nucleic acid molecules encoding a pair of guide RNAs, wherein the pair of guide RNAs comprises or consists of any one of the pairs of guide sequences of any one of Tables 3B or 3D for exon 50. In some embodiments, a composition is provided comprising one or more nucleic acid molecules encoding a pair of guide RNAs, wherein the pair of guide RNAs comprises or consists of any one of the pairs of guide sequences of any one of Tables 4B or 4D for exon 51. In some embodiments, a composition is provided comprising one or more nucleic acid molecules encoding a pair of guide RNAs, wherein the pair of guide RNAs comprises or consists of any one of the pairs of guide sequences of any one of Tables 5B or 5D for exon 53.

[0133] In some embodiments, a composition is provided comprising a pair of guide RNAs or a nucleic acid encoding a pair of guide RNAs, wherein the guide RNAs comprise or consist of any one of the following pairs of guide sequences:
[0134] a. For exon 44 (e.g., with SluCas9): SEQ ID NOs: 200 and 203; 200 and 204; 202 and 203; 202 and 205; 202 and 206; 202 and 207; 204 and 208; 204 and 205; 204 and 206; 204 and 207; or 204 and 208;
[0135] b. For exon 45 (e.g., with SluCas9), SEQ ID NOs: 223 and 230; or 224 and 212.
[0136] c. For exon 50 with SluCas9, SEQ ID NOs: 231 and 232; 231 and 234; 231 and 236; 231 and 237; 236 and 233; 236 and 235; 236 and 238; 236 and 240; or 236 and 241;
[0137] d. For exon 51 (e.g., with SaCas9), SEQ ID NOs: 28 and 57; 31 and 57; 31 and 46; 32 and 69; 33 and 57; 33 and 69; 34 and 57; 36 and 69; 37 and 69; 37 and 46; 39 and 46; 40 and 46; 46 and 35; 46 and 62; 46 and 65; 46 and 67; 47 and 57; 48 and 57; 49 and 57; 51 and 57; 53 and 46; 54 and 46; 55 and 46; 58 and 46; 59 and 46; 60 and 46; 61 and 69; or 69 and 30;
[0138] e. For exon 51 (e.g., with SluCas9), SEQ ID NOs: 243 and 252; 245 and 252; 252 and 253; 252 and 254; 252 and 256; 252 and 257; 252 and 258; 252 and 262; 252 and 264; 252 and 265; or 252 and 266;
[0139] f. For exon 53 (e.g., with SaCas9), SEQ ID NOs: 86 and 96; 87 and 96; 88 and 97; 89 and 96; 90 and 97; 92 and 77; 92 and 78; 92 and 96; 92 and 99; 93 and 98; 93 and 102; 94 and 100; 95 and 77; 95 and 78; 95 and 99; 96 and 100; 97 and 98; 97 and 102; 98 and 73; or 102 and 73; and
[0140] g. For exon 53 (e.g., with SluCas9), SEQ ID NOs: 278 and 290; 278 and 292; 281 and 291; 283 and 290; 283 and 292; 287 and 291; 272 and 290; 290 and 291; 272 and 292; 950 and 275; 951 and 275; 952 and 275; 953 and 275; 954 and 275; or 955 and 275.

[0141] In some embodiments, a composition is provided comprising: i) an SaCas9-KKH or a nucleic acid encoding a SaCas9-KKH, and ii) a first and a second guide RNA, or a nucleic acid encoding a first and a second guide RNA, wherein the first guide RNA comprises the nucleotide sequence of SEQ ID NO: 88, and wherein the second guide RNA comprises the nucleotide sequence of SEQ ID NO: 97. In some embodiments, a composition is provided comprising: i) a SluCas9 or a nucleic acid encoding a SluCas9, and ii) a first and a second guide RNA, or a nucleic acid encoding a first and a second guide RNA, wherein the first guide RNA comprises the nucleotide sequence of SEQ ID NO: 283, and wherein the second guide RNA comprises the nucleotide sequence of SEQ ID NO: 290. In some embodiments, a composition is provided comprising: i) a SluCas9 or a nucleic acid encoding a SluCas9, and ii) a first and a second guide RNA, or a nucleic acid encoding a first and a second guide RNA, wherein the first guide RNA comprises the nucleotide sequence of SEQ ID NO: 283, and wherein the second guide RNA comprises the nucleotide sequence of SEQ ID NO: 292.

[0142] In some embodiments, the disclosure provides for one or more nucleic acid molecules encoding a pair of guide RNAs comprising a first guide RNA and a second guide RNA, wherein the first guide RNA and the second guide RNA target exon 53. In some embodiments, the guide RNAs are for use with an SaCas9 endonuclease. In some embodiments, the one or more nucleic acid molecules also encode for an SaCas9 endonuclease. In some embodiments, the one or more nucleic acid molecules are in a composition further comprising an SaCas9 endonuclease. In some embodiments, the first guide RNA comprises the sequence of SEQ ID NOs: 86 and the second guide RNA comprises the sequence of SEQ ID NO: 96. In some embodiments, the first guide RNA comprises the sequence of SEQ ID NOs: 87 and the second guide RNA comprises the sequence of SEQ ID NO: 96. In some embodiments, the first guide RNA comprises the sequence of SEQ ID NOs: 88 and the second guide RNA comprises the sequence of SEQ ID NO: 97. In some embodiments, the first guide RNA comprises the sequence of SEQ ID NOs: 89 and the second guide RNA comprises the sequence of SEQ ID NO: 96. In some embodiments, the first guide RNA comprises the sequence of SEQ ID NOs: 90 and the second guide RNA comprises the sequence of SEQ ID NO: 97. In some embodiments, the first guide RNA comprises the sequence of SEQ ID NOs: 92 and the second guide RNA comprises the sequence of SEQ ID NO: 77. In some embodiments, the first guide RNA comprises the sequence of SEQ ID NOs: 92 and the second guide RNA comprises the sequence of SEQ ID NO: 78. In some embodiments, the first guide RNA comprises the sequence of SEQ ID NOs: 92 and the second guide RNA comprises the sequence of SEQ ID NO: 96. In some embodiments, the first guide RNA comprises the sequence of SEQ ID NOs: 92 and the second guide RNA comprises the sequence of SEQ ID NO: 99. In some embodiments, the first guide RNA comprises the sequence of SEQ ID NOs: 93 and the second guide RNA comprises the sequence of SEQ ID NO: 98. In some embodiments, the first guide RNA comprises the sequence of SEQ ID NOs: 93 and the second guide RNA comprises the sequence of SEQ ID NO: 102. In some embodiments, the first guide RNA comprises the sequence of SEQ ID NOs: 94 and the second guide RNA comprises the sequence of SEQ ID NO: 100. In some embodiments, the first guide RNA comprises the sequence of SEQ ID NOs: 95 and the second guide RNA comprises the sequence of SEQ ID NO: 77. In some embodiments, the first guide RNA comprises the sequence of SEQ ID NOs: 95 and the second guide RNA comprises the sequence of SEQ ID NO: 78. In some embodiments, the first guide RNA comprises the sequence of SEQ ID NOs: 95 and the second guide RNA comprises the sequence of SEQ ID NO: 99. In some embodiments, the first guide RNA comprises the sequence of SEQ ID NOs: 96 and the second guide RNA comprises the sequence of SEQ ID NO: 100. In some embodiments, the first guide RNA comprises the sequence of SEQ ID NOs: 97 and the second guide RNA comprises the sequence of SEQ ID NO: 98. In some embodiments, the first guide RNA comprises the sequence of SEQ ID NOs: 97 and the second guide RNA comprises the sequence of SEQ ID NO: 102. In some embodiments, the first guide RNA comprises the sequence of SEQ ID NOs: 98 and the second guide RNA comprises the sequence of SEQ ID NO: 73. In some embodiments, the first guide RNA comprises the sequence of SEQ ID NOs: 102 and the second guide RNA comprises the sequence of SEQ ID NO: 73. In some embodiments the guide RNAs each comprise a scaffold sequence comprising the sequence of SEQ ID NO: 504.

[0143] In some embodiments, the disclosure provides for one or more nucleic acid molecules encoding a pair of guide RNAs comprising a first guide RNA and a second guide RNA, wherein the first guide RNA and the second guide RNA target exon 53. In some embodiments, the guide RNAs are for use with an SluCas9 endonuclease. In some embodiments, the one or more nucleic acid molecules also encode for an SluCas9 endonuclease. In some embodiments, the one or more nucleic acid molecules are in a composition further comprising an SluCas9 endonuclease. In some embodiments, the first guide RNA comprises the sequence of SEQ ID NOs: 278 and the second guide RNA comprises the sequence of SEQ ID NO: 290. In some embodiments, the first guide RNA comprises the sequence of SEQ ID NOs: 278 and the second guide RNA comprises the sequence of SEQ ID NO: 292. In some embodiments, the first guide RNA comprises the sequence of SEQ ID NOs: 281 and the second guide RNA comprises the sequence of SEQ ID NO: 291. In some embodiments, the first guide RNA comprises the sequence of SEQ ID NOs: 283 and the second guide RNA comprises the sequence of SEQ ID NO: 290. In some embodiments, the first guide RNA comprises the sequence of SEQ ID NOs: 283 and the second guide RNA comprises the sequence of SEQ ID NO: 292. In some embodiments, the first guide RNA comprises the sequence of SEQ ID NOs: 287 and the second guide RNA comprises the sequence of SEQ ID NO: 291. In some embodiments, the first guide RNA comprises the sequence of SEQ ID NOs: 272 and the second guide RNA comprises the sequence of SEQ ID NO: 290. In some embodiments, the first guide RNA comprises the sequence of SEQ ID NOs: 291 and the second guide RNA comprises the sequence of SEQ ID NO: 290. In some embodiments, the first guide RNA comprises the sequence of SEQ ID NOs: 278 and the second guide RNA comprises the sequence of SEQ ID NO: 290. In some embodiments, the first guide RNA comprises the sequence of SEQ ID NOs: 272 and the second guide RNA comprises the sequence of SEQ ID NO: 292. In some embodiments the guide RNAs each comprise a scaffold sequence comprising the sequence of SEQ ID NO: 901.

[0144] In some embodiments, the disclosure provides for one or more nucleic acid molecules encoding a pair of guide RNAs comprising a first guide RNA and a second guide RNA, wherein the first guide RNA and the second guide RNA target exon 44. In some embodiments, the guide RNAs are for use with an SluCas9 endonuclease. In some embodiments, the one or more nucleic acid molecules also encode for an SluCas9 endonuclease. In some embodiments, the one or more nucleic acid molecules are in a composition further comprising an SluCas9 endonuclease. In some embodiments, the first guide RNA comprises the sequence of SEQ ID NOs: 200 and the second guide RNA comprises the sequence of SEQ ID NO: 203. In some embodiments, the first guide RNA comprises the sequence of SEQ ID NOs: 200 and the second guide RNA comprises the sequence of SEQ ID NO: 204. In some embodiments, the first guide RNA comprises the sequence of SEQ ID NOs: 202 and the second guide RNA comprises the sequence of SEQ ID NO: 203. In some embodiments, the first guide RNA comprises the sequence of SEQ ID NOs: 202 and the second guide RNA comprises the sequence of SEQ ID NO: 205. In some embodiments, the first guide RNA comprises the sequence of SEQ ID NOs: 202 and the second guide RNA comprises the sequence of SEQ ID NO: 206. In some embodiments, the first guide RNA comprises the sequence of SEQ ID NOs: 202 and the second guide RNA comprises the sequence of SEQ ID NO: 207. In some embodiments, the first guide RNA comprises the sequence of SEQ ID NOs: 204 and the second guide RNA comprises the sequence of SEQ ID NO: 208. In some embodiments, the first guide RNA comprises the sequence of SEQ ID NOs: 204 and the second guide RNA comprises the sequence of SEQ ID NO: 205. In some embodiments, the first guide RNA comprises the sequence of SEQ ID NOs: 204 and the second guide RNA comprises the sequence of SEQ ID NO: 206. In some embodiments, the first guide RNA comprises the sequence of SEQ ID NOs: 204 and the second guide RNA comprises the sequence of SEQ ID NO: 207. In some embodiments, the first guide RNA comprises the sequence of SEQ ID NOs: 204 and the second guide RNA comprises the sequence of SEQ ID NO: 208. In some embodiments the guide RNAs each comprise a scaffold sequence comprising the sequence of SEQ ID NO: 901.

[0145] In some embodiments, the disclosure provides for one or more nucleic acid molecules encoding a pair of guide RNAs comprising a first guide RNA and a second guide RNA, wherein the first guide RNA and the second guide RNA target exon 50. In some embodiments, the guide RNAs are for use with an SluCas9 endonuclease. In some embodiments, the one or more nucleic acid molecules also encode for an SluCas9 endonuclease. In some embodiments, the one or more nucleic acid molecules are in a composition further comprising an SluCas9 endonuclease. In some embodiments, the first guide RNA comprises the sequence of SEQ ID NOs: 231 and the second guide RNA comprises the sequence of SEQ ID NO: 232. In some embodiments, the first guide RNA comprises the sequence of SEQ ID NOs: 231 and the second guide RNA comprises the sequence of SEQ ID NO: 234. In some embodiments, the first guide RNA comprises the sequence of SEQ ID NOs: 231 and the second guide RNA comprises the sequence of SEQ ID NO: 236. In some embodiments, the first guide RNA comprises the sequence of SEQ ID NOs: 231 and the second guide RNA comprises the sequence of SEQ ID NO: 237. In some embodiments, the first guide RNA comprises the sequence of SEQ ID NOs: 236 and the second guide RNA comprises the sequence of SEQ ID NO: 233. In some embodiments, the first guide RNA comprises the sequence of SEQ ID NOs: 236 and the second guide RNA comprises the sequence of SEQ ID NO: 235. In some embodiments, the first guide RNA comprises the sequence of SEQ ID NOs: 236 and the second guide RNA comprises the sequence of SEQ ID NO: 238. In some embodiments, the first guide RNA comprises the sequence of SEQ ID NOs: 236 and the second guide RNA comprises the sequence of SEQ ID NO: 240. In some embodiments, the first guide RNA comprises the sequence of SEQ ID NOs: 236 and the second guide RNA comprises the sequence of SEQ ID NO: 241. In some embodiments the guide RNAs each comprise a scaffold sequence comprising the sequence of SEQ ID NO: 901.

[0146] In some embodiments, the composition further comprises an endonuclease or a nucleic acid encoding an endonuclease. An exemplary endonuclease for use with each of the guide RNAs or pairs of guide RNAs is provided herein, for example, in Table 6, at column “enzyme,” or in the “Guide ID” name as “Sa” for SaCas9, “SaCas9KKH” for SaCas9, or “SL” for SluCas9.

[0147] In some embodiments, a composition is provided comprising a single nucleic acid molecule comprising a nucleic acid encoding any of the guide RNAs disclosed herein, or any of the pairs of guide RNAs disclosed herein, and optionally a nucleic acid encoding an endonuclease.

[0148] In some embodiments, a composition is provided comprising at least two nucleic acid molecules comprising a nucleic acid encoding any of the guide RNAs disclosed herein, or any of the pairs of guide RNAs disclosed herein, and optionally a nucleic acid encoding an endonuclease, wherein at least one nucleic acid molecule does not comprise a nucleic acid encoding an endonuclease.

[0149] In some embodiments, a composition is provided comprising or consisting of a single nucleic acid molecule comprising: i) a nucleic acid encoding Staphylococcus aureus Cas9 (SaCas9) or Staphylococcus lugdunensis (SluCas9) and at least one, at least two, or at least three guide RNAs; or ii) a nucleic acid encoding Staphylococcus aureus Cas9 (SaCas9) or Staphylococcus lugdunensis (SluCas9) and from one to n guide RNAs, wherein n is no more than the maximum number of guide RNAs that can be expressed from said nucleic acid; or iii) a nucleic acid encoding Staphylococcus aureus Cas9 (SaCas9) or Staphylococcus lugdunensis (SluCas9) and one to three guide RNAs, wherein in each instance, the single nucleic acid molecule comprises a nucleic acid encoding at least one, at least two, or two guide sequence(s) of Table 6. In some embodiments, the single nucleic acid molecule comprises nucleic acid encoding any one of the following pairs of guide sequences:
[0150] a. For exon 44 (with e.g., SaCas9), SEQ ID NOs: 1 and 3; 110 and 120; 110 and 121; 110 and 122; 110 and 123; 110 and 124; 110 and 125; 111 and 112; 111 and 113; 111 and 114; 111 and 115; 111 and 116; 111 and 117; 111 and 118; 111 and 119; 111 and 120; 111 and 121; 111 and 122; 111 and 123; 111 and 124; 111 and 125; 112 and 113; 112 and 114; 112 and 115; 112 and 116; 112 and 117; 112 and 118; 112 and 119; 112 and 120; 112 and 121; 112 and 122; 112 and 123; 112 and 124; 112 and 125; 113 and 114; 113 and 115; 113 and 116; 113 and 117; 113 and 118; 113 and 119; 113 and 120; 113 and 121; 113 and 122; 113 and 123; 113 and 124; 113 and 125; 114 and 115; 114 and 116; 114 and 117; 114 and 118; 114 and 119; 114 and 120; 114 and 121; 114 and 122; 114 and 123; 114 and 124; 114 and 125; 115 and 116; 115 and 117; 115 and 118; 115 and 119; 115 and 120; 115 and 121; 115 and 122; 115 and 123; 115 and 124; 115 and 125; 116 and 117; 116 and 118; 116 and 119; 116 and 120; 116 and 121; 116 and 122; 116 and 123; 116 and 124; 116 and 125; 117 and 118; 117 and 119; 117 and 120; 117 and 121; 117 and 122; 117 and 123; 117 and 124; 117 and 125; 118 and 119; 118 and 120; 118 and 121; 118 and 122; 118 and 123; 118 and 124; 118 and 125; 119 and 120; 119 and 121; 119 and 122; 119 and 123; 119 and 124; 119 and 125; 120 and 121; 120 and 122; 120 and 123; 120 and 124; 120 and 125; 121 and 122; 121 and 123; 121 and 124; 121 and 125; 122 and 123; 122 and 124; 122 and 125; 123 and 124; 123 and 125; 124 and 125;
[0151] b. For exon 44 (with, e.g., SluCas9), SEQ ID NOs: 200 and 201; 200 and 202; 200 and 203; 200 and 204; 200 and 205; 200 and 206; 200 and 207; 200 and 208; 201 and 202; 201 and 203; 201 and 204; 201 and 205; 201 and 206; 201 and 207; 201 and 208; 202 and 203; 202 and 204; 202 and 205; 202 and 206; 202 and 207; 202 and 208; 203 and 204; 203 and 205; 203 and 206; 203 and 207; 203 and 208; 204 and 205; 204 and 206; 204 and 207; 204 and 208; 205 and 206; 205 and 207; 205 and 208; 206 and 207; 206 and 208; 207 and 208;
[0152] c. For exon 45 (with, e.g., SaCas9), SEQ ID NOs: 3 and 4; 3 and 5; 3 and 6; 3 and 7; 3 and 8; 3 and 9; 4 and 5; 4 and 6; 4 and 7; 4 and 8; 4 and 9; 5 and 6; 5 and 7; 5 and 8; 5 and 9; 6 and 7; 6 and 8; 6 and 9; 7 and 8; 7 and 9; 8 and 9; 126 and 127; 126 and 128; 126 and 129; 126 and 130; 126 and 131; 126 and 132; 126 and 133; 126 and 134; 126 and 135; 126 and 136; 126 and 137; 126 and 138; 126 and 139; 126 and 140; 126 and 141; 126 and 142; 126 and 143; 126 and 144; 126 and 145; 126 and 146; 126 and 147; 127 and 128; 127 and 129; 127 and 130; 127 and 131; 127 and 132; 127 and 133; 127 and 134; 127 and 135; 127 and 136; 127 and 137; 127 and 138; 127 and 139; 127 and 140; 127 and 141; 127 and 142; 127 and 143; 127 and 144; 127 and 145; 127 and 146; 127 and 147; 128 and 129; 128 and 130; 128 and 131; 128 and 132; 128 and 133; 128 and 134; 128 and 135; 128 and 136; 128 and 137; 128 and 138; 128 and 139; 128 and 140; 128 and 141; 128 and 142; 128 and 143; 128 and 144; 128 and 145; 128 and 146; 128 and 147; 129 and 130; 129 and 131; 129 and 132; 129 and 133; 129 and 134; 129 and 135; 129 and 136; 129 and 137; 129 and 138; 129 and 139; 129 and 140; 129 and 141; 129 and 142; 129 and 143; 129 and 144; 129 and 145; 129 and 146; 129 and 147; 130 and 131; 130 and 132; 130 and 133; 130 and 134; 130 and 135; 130 and 136; 130 and 137; 130 and 138; 130 and 139; 130 and 140; 130 and 141; 130 and 142; 130 and 143; 130 and 144; 130 and 145; 130 and 146; 130 and 147; 131 and 132; 131 and 133; 131 and 134; 131 and 135; 131 and 136; 131 and 137; 131 and 138; 131 and 139; 131 and 140; 131 and 141; 131 and 142; 131 and 143; 131 and 144; 131 and 145; 131 and 146; 131 and 147; 132 and 133; 132 and 134; 132 and 135; 132 and 136; 132 and 137; 132 and 138; 132 and 139; 132 and 140; 132 and 141; 132 and 142; 132 and 143; 132 and 144; 132 and 145; 132 and 146; 132 and 147; 133 and 134; 133 and 135; 133 and 136; 133 and 137; 133 and 138; 133 and 139; 133 and 140; 133 and 141; 133 and 142; 133 and 143; 133 and 144; 133 and 145; 133 and 146; 133 and 147; 134 and 135; 134 and 136; 134 and 137; 134 and 138; 134 and 139; 134 and 140; 134 and 141; 134 and 142; 134 and 143; 134 and 144; 134 and 145; 134 and 146; 134 and 147; 135 and 136; 135 and 137; 135 and 138; 135 and 139; 135 and 140; 135 and 141; 135 and 142; 135 and 143; 135 and 144; 135 and 145; 135 and 146; 135 and 147; 136 and 137; 136 and 138; 136 and 139; 136 and 140; 136 and 141; 136 and 142; 136 and 143; 136 and 144; 136 and 145; 136 and 146; 136 and 147; 137 and 138; 137 and 139; 137 and 140; 137 and 141; 137 and 142; 137 and 143; 137 and 144; 137 and 145; 137 and 146; 137 and 147; 138 and 139; 138 and 140; 138 and 141; 138 and 142; 138 and 143; 138 and 144; 138 and 145; 138 and 146; 138 and 147; 139 and 140; 139 and 141; 139 and 142; 139 and 143; 139 and 144; 139 and 145; 139 and 146; 139 and 147; 140 and 141; 140 and 142; 140 and 143; 140 and 144; 140 and 145; 140 and 146; 140 and 147; 141 and 142; 141 and 143; 141 and 144; 141 and 145; 141 and 146; 141 and 147; 142 and 143; 142 and 144; 142 and 145; 142 and 146; 142 and 147; 143 and 144; 143 and 145; 143 and 146; 143 and 147; 144 and 145; 144 and 146; 144 and 147; 145 and 146; 145 and 147; 146 and 147;
[0153] d. For exon 45 (with, e.g., SluCas9), SEQ ID NOs: 209 and 210; 209 and 211; 209 and 212; 209 and 213; 209 and 214; 209 and 215; 209 and 216; 209 and 217; 209 and 218; 209 and 219; 209 and 220; 209 and 221; 209 and 222; 209 and 223; 209 and 224; 209 and 225; 209 and 226; 209 and 227; 209 and 228; 209 and 229; 209 and 230; 210 and 211; 210 and 212; 210 and 213; 210 and 214; 210 and 215; 210 and 216; 210 and 217; 210 and 218; 210 and 219; 210 and 220; 210 and 221; 210 and 222; 210 and 223; 210 and 224; 210 and 225; 210 and 226; 210 and 227; 210 and 228; 210 and 229; 210 and 230; 211 and 212; 211 and 213; 211 and 214; 211 and 215; 211 and 216; 211 and 217; 211 and 218; 211 and 219; 211 and 220; 211 and 221; 211 and 222; 211 and 223; 211 and 224; 211 and 225; 211 and 226; 211 and 227; 211 and 228; 211 and 229; 211 and 230; 212 and 213; 212 and 214; 212 and 215; 212 and 216; 212 and 217; 212 and 218; 212 and 219; 212 and 220; 212 and 221; 212 and 222; 212 and 223; 212 and 224; 212 and 225; 212 and 226; 212 and 227; 212 and 228; 212 and 229; 212 and 230; 213 and 214; 213 and 215; 213 and 216; 213 and 217; 213 and 218; 213 and 219; 213 and 220; 213 and 221; 213 and 222; 213 and 223; 213 and 224; 213 and 225; 213 and 226; 213 and 227; 213 and 228; 213 and 229; 213 and 230; 214 and 215; 214 and 216; 214 and 217; 214 and 218; 214 and 219; 214 and 220; 214 and 221; 214 and 222; 214 and 223; 214 and 224; 214 and 225; 214 and 226; 214 and 227; 214 and 228; 214 and 229; 214 and 230; 215 and 216; 215 and 217; 215 and 218; 215 and 219; 215 and 220; 215 and 221; 215 and 222; 215 and 223; 215 and 224; 215 and 225; 215 and 226; 215 and 227; 215 and 228; 215 and 229; 215 and 230; 216 and 217; 216 and 218; 216 and 219; 216 and 220; 216 and 221; 216 and 222; 216 and 223; 216 and 224; 216 and 225; 216 and 226; 216 and 227; 216 and 228; 216 and 229; 216 and 230; 217 and 218; 217 and 219; 217 and 220; 217 and 221; 217 and 222; 217 and 223; 217 and 224; 217 and 225; 217 and 226; 217 and 227; 217 and 228; 217 and 229; 217 and 230; 218 and 219; 218 and 220; 218 and 221; 218 and 222; 218 and 223; 218 and 224; 218 and 225; 218 and 226; 218 and 227; 218 and 228; 218 and 229; 218 and 230; 219 and 220; 219 and 221; 219 and 222; 219 and 223; 219 and 224; 219 and 225; 219 and 226; 219 and 227; 219 and 228; 219 and 229; 219 and 230; 220 and 221; 220 and 222; 220 and 223; 220 and 224; 220 and 225; 220 and 226; 220 and 227; 220 and 228; 220 and 229; 220 and 230; 221 and 222; 221 and 223; 221 and 224; 221 and 225; 221 and 226; 221 and 227; 221 and 228; 221 and 229; 221 and 230; 222 and 223; 222 and 224; 222 and 225; 222 and 226; 222 and 227; 222 and 228; 222 and 229; 222 and 230; 223 and 224; 223 and 225; 223 and 226; 223 and 227; 223 and 228; 223 and 229; 223 and 230; 224 and 225; 224 and 226; 224 and 227; 224 and 228; 224 and 229; 224 and 230; 225 and 226; 225 and 227; 225 and 228; 225 and 229; 225 and 230; 226 and 227; 226 and 228; 226 and 229; 226 and 230; 227 and 228; 227 and 229; 227 and 230; 228 and 229; 228 and 230; 229 and 230;
[0154] e. For exon 50 (with, e.g., SaCas9), SEQ ID NOs: 148 and 149; 148 and 150; 148 and 151; 148 and 152; 148 and 153; 148 and 154; 148 and 155; 148 and 156; 148 and 157; 148 and 158; 148 and 159; 149 and 150; 149 and 151; 149 and 152; 149 and 153; 149 and 154; 149 and 155; 149 and 156; 149 and 157; 149 and 158; 149 and 159; 150 and 151; 150 and 152; 150 and 153; 150 and 154; 150 and 155; 150 and 156; 150 and 157; 150 and 158; 150 and 159; 151 and 152; 151 and 153; 151 and 154; 151 and 155; 151 and 156; 151 and 157; 151 and 158; 151 and 159; 152 and 153; 152 and 154; 152 and 155; 152 and 156; 152 and 157; 152 and 158; 152 and 159; 153 and 154; 153 and 155; 153 and 156; 153 and 157; 153 and 158; 153 and 159; 154 and 155; 154 and 156; 154 and 157; 154 and 158; 154 and 159; 155 and 156; 155 and 157; 155 and 158; 155 and 159; 156 and 157; 156 and 158; 156 and 159; 157 and 158; 157 and 159; 158 and 159;
[0155] f. For exon 50 (with, e.g., SluCas9), SEQ ID NOs: 231 and 232; 231 and 233; 231 and 234; 231 and 235; 231 and 236; 231 and 237; 231 and 238; 231 and 239; 231 and 240; 231 and 241; 231 and 242; 232 and 233; 232 and 234; 232 and 235; 232 and 236; 232 and 237; 232 and 238; 232 and 239; 232 and 240; 232 and 241; 232 and 242; 233 and 234; 233 and 235; 233 and 236; 233 and 237; 233 and 238; 233 and 239; 233 and 240; 233 and 241; 233 and 242; 234 and 235; 234 and 236; 234 and 237; 234 and 238; 234 and 239; 234 and 240; 234 and 241; 234 and 242; 235 and 236; 235 and 237; 235 and 238; 235 and 239; 235 and 240; 235 and 241; 235 and 242; 236 and 237; 236 and 238; 236 and 239; 236 and 240; 236 and 241; 236 and 242; 237 and 238; 237 and 239; 237 and 240; 237 and 241; 237 and 242; 238 and 239; 238 and 240; 238 and 241; 238 and 242; 239 and 240; 239 and 241; 239 and 242; 240 and 241; 240 and 242; 241 and 242;
[0156] g. For exon 51 (with, e.g., SaCas9), SEQ ID NOs: 11 and 12; 11 and 13; 11 and 14; 11 and 15; 12 and 13; 12 and 14; 12 and 15; 13 and 14; 13 and 15; 14 and 15; 27 and 28; 27 and 29; 27 and 30; 27 and 31; 27 and 32; 27 and 33; 27 and 34; 27 and 35; 27 and 36; 27 and 37; 27 and 38; 27 and 39; 27 and 40; 27 and 41; 27 and 42; 27 and 43; 27 and 44; 27 and 45; 27 and 46; 27 and 47; 27 and 48; 27 and 53; 27 and 54; 27 and 55; 27 and 56; 27 and 57; 27 and 58; 27 and 59; 27 and 60; 27 and 61; 27 and 62; 27 and 63; 27 and 64; 27 and 65; 27 and 66; 27 and 67; 27 and 68; 27 and 69; 28 and 29; 28 and 30; 28 and 31; 28 and 32; 28 and 33; 28 and 34; 28 and 35; 28 and 36; 28 and 37; 28 and 38; 28 and 39; 28 and 40; 28 and 41; 28 and 42; 28 and 43; 28 and 44; 28 and 45; 28 and 46; 28 and 47; 28 and 48; 28 and 53; 28 and 54; 28 and 55; 28 and 56; 28 and 57; 28 and 58; 28 and 59; 28 and 60; 28 and 61; 28 and 62; 28 and 63; 28 and 64; 28 and 65; 28 and 66; 28 and 67; 28 and 68; 28 and 69; 29 and 30; 29 and 31; 29 and 32; 29 and 33; 29 and 34; 29 and 35; 29 and 36; 29 and 37; 29 and 38; 29 and 39; 29 and 40; 29 and 41; 29 and 42; 29 and 43; 29 and 44; 29 and 45; 29 and 46; 29 and 47; 29 and 48; 29 and 53; 29 and 54; 29 and 55; 29 and 56; 29 and 57; 29 and 58; 29 and 59; 29 and 60; 29 and 61; 29 and 62; 29 and 63; 29 and 64; 29 and 65; 29 and 66; 29 and 67; 29 and 68; 29 and 69; 30 and 31; 30 and 32; 30 and 33; 30 and 34; 30 and 35; 30 and 36; 30 and 37; 30 and 38; 30 and 39; 30 and 40; 30 and 41; 30 and 42; 30 and 43; 30 and 44; 30 and 45; 30 and 46; 30 and 47; 30 and 48; 30 and 53; 30 and 54; 30 and 55; 30 and 56; 30 and 57; 30 and 58; 30 and 59; 30 and 60; 30 and 61; 30 and 62; 30 and 63; 30 and 64; 30 and 65; 30 and 66; 30 and 67; 30 and 68; 30 and 69; 31 and 32; 31 and 33; 31 and 34; 31 and 35; 31 and 36; 31 and 37; 31 and 38; 31 and 39; 31 and 40; 31 and 41; 31 and 42; 31 and 43; 31 and 44; 31 and 45; 31 and 46; 31 and 47; 31 and 48; 31 and 53; 31 and 54; 31 and 55; 31 and 56; 31 and 57; 31 and 58; 31 and 59; 31 and 60; 31 and 61; 31 and 62; 31 and 63; 31 and 64; 31 and 65; 31 and 66; 31 and 67; 31 and 68; 31 and 69; 32 and 33; 32 and 34; 32 and 35; 32 and 36; 32 and 37; 32 and 38; 32 and 39; 32 and 40; 32 and 41; 32 and 42; 32 and 43; 32 and 44; 32 and 45; 32 and 46; 32 and 47; 32 and 48; 32 and 53; 32 and 54; 32 and 55; 32 and 56; 32 and 57; 32 and 58; 32 and 59; 32 and 60; 32 and 61; 32 and 62; 32 and 63; 32 and 64; 32 and 65; 32 and 66; 32 and 67; 32 and 68; 32 and 69; 33 and 34; 33 and 35; 33 and 36; 33 and 37; 33 and 38; 33 and 39; 33 and 40; 33 and 41; 33 and 42; 33 and 43; 33 and 44; 33 and 45; 33 and 46; 33 and 47; 33 and 48; 33 and 53; 33 and 54; 33 and 55; 33 and 56; 33 and 57; 33 and 58; 33 and 59; 33 and 60; 33 and 61; 33 and 62; 33 and 63; 33 and 64; 33 and 65; 33 and 66; 33 and 67; 33 and 68; 33 and 69; 34 and 35; 34 and 36; 34 and 37; 34 and 38; 34 and 39; 34 and 40; 34 and 41; 34 and 42; 34 and 43; 34 and 44; 34 and 45; 34 and 46; 34 and 47; 34 and 48; 34 and 53; 34 and 54; 34 and 55; 34 and 56; 34 and 57; 34 and 58; 34 and 59; 34 and 60; 34 and 61; 34 and 62; 34 and 63; 34 and 64; 34 and 65; 34 and 66; 34 and 67; 34 and 68; 34 and 69; 35 and 36; 35 and 37; 35 and 38; 35 and 39; 35 and 40; 35 and 41; 35 and 42; 35 and 43; 35 and 44; 35 and 45; 35 and 46; 35 and 47; 35 and 48; 35 and 53; 35 and 54; 35 and 55; 35 and 56; 35 and 57; 35 and 58; 35 and 59; 35 and 60; 35 and 61; 35 and 62; 35 and 63; 35 and 64; 35 and 65; 35 and 66; 35 and 67; 35 and 68; 35 and 69; 36 and 37; 36 and 38; 36 and 39; 36 and 40; 36 and 41; 36 and 42; 36 and 43; 36 and 44; 36 and 45; 36 and 46; 36 and 47; 36 and 48; 36 and 53; 36 and 54; 36 and 55; 36 and 56; 36 and 57; 36 and 58; 36 and 59; 36 and 60; 36 and 61; 36 and 62; 36 and 63; 36 and 64; 36 and 65; 36 and 66; 36 and 67; 36 and 68; 36 and 69; 37 and 38; 37 and 39; 37 and 40; 37 and 41; 37 and 42; 37 and 43; 37 and 44; 37 and 45; 37 and 46; 37 and 47; 37 and 48; 37 and 53; 37 and 54; 37 and 55; 37 and 56; 37 and 57; 37 and 58; 37 and 59; 37 and 60; 37 and 61; 37 and 62; 37 and 63; 37 and 64; 37 and 65; 37 and 66; 37 and 67; 37 and 68; 37 and 69; 38 and 39; 38 and 40; 38 and 41; 38 and 42; 38 and 43; 38 and 44; 38 and 45; 38 and 46; 38 and 47; 38 and 48; 38 and 53; 38 and 54; 38 and 55; 38 and 56; 38 and 57; 38 and 58; 38 and 59; 38 and 60; 38 and 61; 38 and 62; 38 and 63; 38 and 64; 38 and 65; 38 and 66; 38 and 67; 38 and 68; 38 and 69; 39 and 40; 39 and 41; 39 and 42; 39 and 43; 39 and 44; 39 and 45; 39 and 46; 39 and 47; 39 and 48; 39 and 53; 39 and 54; 39 and 55; 39 and 56; 39 and 57; 39 and 58; 39 and 59; 39 and 60; 39 and 61; 39 and 62; 39 and 63; 39 and 64; 39 and 65; 39 and 66; 39 and 67; 39 and 68; 39 and 69; 40 and 41; 40 and 42; 40 and 43; 40 and 44; 40 and 45; 40 and 46; 40 and 47; 40 and 48; 40 and 53; 40 and 54; 40 and 55; 40 and 56; 40 and 57; 40 and 58; 40 and 59; 40 and 60; 40 and 61; 40 and 62; 40 and 63; 40 and 64; 40 and 65; 40 and 66; 40 and 67; 40 and 68; 40 and 69; 41 and 42; 41 and 43; 41 and 44; 41 and 45; 41 and 46; 41 and 47; 41 and 48; 41 and 53; 41 and 54; 41 and 55; 41 and 56; 41 and 57; 41 and 58; 41 and 59; 41 and 60; 41 and 61; 41 and 62; 41 and 63; 41 and 64; 41 and 65; 41 and 66; 41 and 67; 41 and 68; 41 and 69; 42 and 43; 42 and 44; 42 and 45; 42 and 46; 42 and 47; 42 and 48; 42 and 53; 42 and 54; 42 and 55; 42 and 56; 42 and 57; 42 and 58; 42 and 59; 42 and 60; 42 and 61; 42 and 62; 42 and 63; 42 and 64; 42 and 65; 42 and 66; 42 and 67; 42 and 68; 42 and 69; 43 and 44; 43 and 45; 43 and 46; 43 and 47; 43 and 48; 43 and 53; 43 and 54; 43 and 55; 43 and 56; 43 and 57; 43 and 58; 43 and 59; 43 and 60; 43 and 61; 43 and 62; 43 and 63; 43 and 64; 43 and 65; 43 and 66; 43 and 67; 43 and 68; 43 and 69; 44 and 45; 44 and 46; 44 and 47; 44 and 48; 44 and 53; 44 and 54; 44 and 55; 44 and 56; 44 and 57; 44 and 58; 44 and 59; 44 and 60; 44 and 61; 44 and 62; 44 and 63; 44 and 64; 44 and 65; 44 and 66; 44 and 67; 44 and 68; 44 and 69; 45 and 46; 45 and 47; 45 and 48; 45 and 53; 45 and 54; 45 and 55; 45 and 56; 45 and 57; 45 and 58; 45 and 59; 45 and 60; 45 and 61; 45 and 62; 45 and 63; 45 and 64; 45 and 65; 45 and 66; 45 and 67; 45 and 68; 45 and 69; 46 and 47; 46 and 48; 46 and 53; 46 and 54; 46 and 55; 46 and 56; 46 and 57; 46 and 58; 46 and 59; 46 and 60; 46 and 61; 46 and 62; 46 and 63; 46 and 64; 46 and 65; 46 and 66; 46 and 67; 46 and 68; 46 and 69; 47 and 48; 47 and 53; 47 and 54; 47 and 55; 47 and 56; 47 and 57; 47 and 58; 47 and 59; 47 and 60; 47 and 61; 47 and 62; 47 and 63; 47 and 64; 47 and 65; 47 and 66; 47 and 67; 47 and 68; 47 and 69; 48 and 53; 48 and 54; 48 and 55; 48 and 56; 48 and 57; 48 and 58; 48 and 59; 48 and 60; 48 and 61; 48 and 62; 48 and 63; 48 and 64; 48 and 65; 48 and 66; 48 and 67; 48 and 68; 48 and 69; 53 and 54; 53 and 55; 53 and 56; 53 and 57; 53 and 58; 53 and 59; 53 and 60; 53 and 61; 53 and 62; 53 and 63; 53 and 64; 53 and 65; 53 and 66; 53 and 67; 53 and 68; 53 and 69; 54 and 55; 54 and 56; 54 and 57; 54 and 58; 54 and 59; 54 and 60; 54 and 61; 54 and 62; 54 and 63; 54 and 64; 54 and 65; 54 and 66; 54 and 67; 54 and 68; 54 and 69; 55 and 56; 55 and 57; 55 and 58; 55 and 59; 55 and 60; 55 and 61; 55 and 62; 55 and 63; 55 and 64; 55 and 65; 55 and 66; 55 and 67; 55 and 68; 55 and 69; 56 and 57; 56 and 58; 56 and 59; 56 and 60; 56 and 61; 56 and 62; 56 and 63; 56 and 64; 56 and 65; 56 and 66; 56 and 67; 56 and 68; 56 and 69; 57 and 58; 57 and 59; 57 and 60; 57 and 61; 57 and 62; 57 and 63; 57 and 64; 57 and 65; 57 and 66; 57 and 67; 57 and 68; 57 and 69; 58 and 59; 58 and 60; 58 and 61; 58 and 62; 58 and 63; 58 and 64; 58 and 65; 58 and 66; 58 and 67; 58 and 68; 58 and 69; 59 and 60; 59 and 61; 59 and 62; 59 and 63; 59 and 64; 59 and 65; 59 and 66; 59 and 67; 59 and 68; 59 and 69; 60 and 61; 60 and 62; 60 and 63; 60 and 64; 60 and 65; 60 and 66; 60 and 67; 60 and 68; 60 and 69; 61 and 62; 61 and 63; 61 and 64; 61 and 65; 61 and 66; 61 and 67; 61 and 68; 61 and 69; 62 and 63; 62 and 64; 62 and 65; 62 and 66; 62 and 67; 62 and 68; 62 and 69; 63 and 64; 63 and 65; 63 and 66; 63 and 67; 63 and 68; 63 and 69; 64 and 65; 64 and 66; 64 and 67; 64 and 68; 64 and 69; 65 and 66; 65 and 67; 65 and 68; 65 and 69; 66 and 67; 66 and 68; 66 and 69; 67 and 68; 67 and 69; 68 and 69;
[0157] h. For exon 51 (with, e.g., SluCas9), SEQ ID NOs: 243 and 244; 243 and 245; 243 and 246; 243 and 247; 243 and 248; 243 and 249; 243 and 250; 243 and 251; 243 and 252; 243 and 253; 243 and 254; 243 and 255; 243 and 256; 243 and 257; 243 and 258; 243 and 259; 243 and 260; 243 and 261; 243 and 262; 243 and 263; 243 and 264; 243 and 265; 243 and 266; 243 and 267; 243 and 268; 243 and 269; 244 and 245; 244 and 246; 244 and 247; 244 and 248; 244 and 249; 244 and 250; 244 and 251; 244 and 252; 244 and 253; 244 and 254; 244 and 255; 244 and 256; 244 and 257; 244 and 258; 244 and 259; 244 and 260; 244 and 261; 244 and 262; 244 and 263; 244 and 264; 244 and 265; 244 and 266; 244 and 267; 244 and 268; 244 and 269; 245 and 246; 245 and 247; 245 and 248; 245 and 249; 245 and 250; 245 and 251; 245 and 252; 245 and 253; 245 and 254; 245 and 255; 245 and 256; 245 and 257; 245 and 258; 245 and 259; 245 and 260; 245 and 261; 245 and 262; 245 and 263; 245 and 264; 245 and 265; 245 and 266; 245 and 267; 245 and 268; 245 and 269; 246 and 247; 246 and 248; 246 and 249; 246 and 250; 246 and 251; 246 and 252; 246 and 253; 246 and 254; 246 and 255; 246 and 256; 246 and 257; 246 and 258; 246 and 259; 246 and 260; 246 and 261; 246 and 262; 246 and 263; 246 and 264; 246 and 265; 246 and 266; 246 and 267; 246 and 268; 246 and 269; 247 and 248; 247 and 249; 247 and 250; 247 and 251; 247 and 252; 247 and 253; 247 and 254; 247 and 255; 247 and 256; 247 and 257; 247 and 258; 247 and 259; 247 and 260; 247 and 261; 247 and 262; 247 and 263; 247 and 264; 247 and 265; 247 and 266; 247 and 267; 247 and 268; 247 and 269; 248 and 249; 248 and 250; 248 and 251; 248 and 252; 248 and 253; 248 and 254; 248 and 255; 248 and 256; 248 and 257; 248 and 258; 248 and 259; 248 and 260; 248 and 261; 248 and 262; 248 and 263; 248 and 264; 248 and 265; 248 and 266; 248 and 267; 248 and 268; 248 and 269; 249 and 250; 249 and 251; 249 and 252; 249 and 253; 249 and 254; 249 and 255; 249 and 256; 249 and 257; 249 and 258; 249 and 259; 249 and 260; 249 and 261; 249 and 262; 249 and 263; 249 and 264; 249 and 265; 249 and 266; 249 and 267; 249 and 268; 249 and 269; 250 and 251; 250 and 252; 250 and 253; 250 and 254; 250 and 255; 250 and 256; 250 and 257; 250 and 258; 250 and 259; 250 and 260; 250 and 261; 250 and 262; 250 and 263; 250 and 264; 250 and 265; 250 and 266; 250 and 267; 250 and 268; 250 and 269; 251 and 252; 251 and 253; 251 and 254; 251 and 255; 251 and 256; 251 and 257; 251 and 258; 251 and 259; 251 and 260; 251 and 261; 251 and 262; 251 and 263; 251 and 264; 251 and 265; 251 and 266; 251 and 267; 251 and 268; 251 and 269; 252 and 253; 252 and 254; 252 and 255; 252 and 256; 252 and 257; 252 and 258; 252 and 259; 252 and 260; 252 and 261; 252 and 262; 252 and 263; 252 and 264; 252 and 265; 252 and 266; 252 and 267; 252 and 268; 252 and 269; 253 and 254; 253 and 255; 253 and 256; 253 and 257; 253 and 258; 253 and 259; 253 and 260; 253 and 261; 253 and 262; 253 and 263; 253 and 264; 253 and 265; 253 and 266; 253 and 267; 253 and 268; 253 and 269; 254 and 255; 254 and 256; 254 and 257; 254 and 258; 254 and 259; 254 and 260; 254 and 261; 254 and 262; 254 and 263; 254 and 264; 254 and 265; 254 and 266; 254 and 267; 254 and 268; 254 and 269; 255 and 256; 255 and 257; 255 and 258; 255 and 259; 255 and 260; 255 and 261; 255 and 262; 255 and 263; 255 and 264; 255 and 265; 255 and 266; 255 and 267; 255 and 268; 255 and 269; 256 and 257; 256 and 258; 256 and 259; 256 and 260; 256 and 261; 256 and 262; 256 and 263; 256 and 264; 256 and 265; 256 and 266; 256 and 267; 256 and 268; 256 and 269; 257 and 258; 257 and 259; 257 and 260; 257 and 261; 257 and 262; 257 and 263; 257 and 264; 257 and 265; 257 and 266; 257 and 267; 257 and 268; 257 and 269; 258 and 259; 258 and 260; 258 and 261; 258 and 262; 258 and 263; 258 and 264; 258 and 265; 258 and 266; 258 and 267; 258 and 268; 258 and 269; 259 and 260; 259 and 261; 259 and 262; 259 and 263; 259 and 264; 259 and 265; 259 and 266; 259 and 267; 259 and 268; 259 and 269; 260 and 261; 260 and 262; 260 and 263; 260 and 264; 260 and 265; 260 and 266; 260 and 267; 260 and 268; 260 and 269; 261 and 262; 261 and 263; 261 and 264; 261 and 265; 261 and 266; 261 and 267; 261 and 268; 261 and 269; 262 and 263; 262 and 264; 262 and 265; 262 and 266; 262 and 267; 262 and 268; 262 and 269; 263 and 264; 263 and 265; 263 and 266; 263 and 267; 263 and 268; 263 and 269; 264 and 265; 264 and 266; 264 and 267; 264 and 268; 264 and 269; 265 and 266; 265 and 267; 265 and 268; 265 and 269; 266 and 267; 266 and 268; 266 and 269; 267 and 268; 267 and 269; 268 and 269;
[0158] i. For exon 53 (with, e.g., SaCas9), SEQ ID NOs: 16 and 17; 16 and 18; 16 and 19; 16 and 20; 16 and 21; 16 and 22; 16 and 23; 16 and 24; 16 and 25; 16 and 26; 17 and 18; 17 and 19; 17 and 20; 17 and 21; 17 and 22; 17 and 23; 17 and 24; 17 and 25; 17 and 26; 18 and 19; 18 and 20; 18 and 21; 18 and 22; 18 and 23; 18 and 24; 18 and 25; 18 and 26; 19 and 20; 19 and 21; 19 and 22; 19 and 23; 19 and 24; 19 and 25; 19 and 26; 20 and 21; 20 and 22; 20 and 23; 20 and 24; 20 and 25; 20 and 26; 21 and 22; 21 and 23; 21 and 24; 21 and 25; 21 and 26; 22 and 23; 22 and 24; 22 and 25; 22 and 26; 23 and 24; 23 and 25; 23 and 26; 24 and 25; 24 and 26; 25 and 26; 71 and 72; 71 and 73; 71 and 74; 71 and 75; 71 and 76; 71 and 77; 71 and 78; 71 and 84; 71 and 85; 71 and 86; 71 and 87; 71 and 88; 71 and 89; 71 and 90; 71 and 91; 71 and 92; 71 and 93; 71 and 94; 71 and 95; 71 and 96; 71 and 97; 71 and 98; 71 and 99; 71 and 100; 71 and 101; 71 and 102; 72 and 73; 72 and 74; 72 and 75; 72 and 76; 72 and 77; 72 and 78; 72 and 84; 72 and 85; 72 and 86; 72 and 87; 72 and 88; 72 and 89; 72 and 90; 72 and 91; 72 and 92; 72 and 93; 72 and 94; 72 and 95; 72 and 96; 72 and 97; 72 and 98; 72 and 99; 72 and 100; 72 and 101; 72 and 102; 73 and 74; 73 and 75; 73 and 76; 73 and 77; 73 and 78; 73 and 84; 73 and 85; 73 and 86; 73 and 87; 73 and 88; 73 and 89; 73 and 90; 73 and 91; 73 and 92; 73 and 93; 73 and 94; 73 and 95; 73 and 96; 73 and 97; 73 and 98; 73 and 99; 73 and 100; 73 and 101; 73 and 102; 74 and 75; 74 and 76; 74 and 77; 74 and 78; 74 and 84; 74 and 85; 74 and 86; 74 and 87; 74 and 88; 74 and 89; 74 and 90; 74 and 91; 74 and 92; 74 and 93; 74 and 94; 74 and 95; 74 and 96; 74 and 97; 74 and 98; 74 and 99; 74 and 100; 74 and 101; 74 and 102; 75 and 76; 75 and 77; 75 and 78; 75 and 84; 75 and 85; 75 and 86; 75 and 87; 75 and 88; 75 and 89; 75 and 90; 75 and 91; 75 and 92; 75 and 93; 75 and 94; 75 and 95; 75 and 96; 75 and 97; 75 and 98; 75 and 99; 75 and 100; 75 and 101; 75 and 102; 76 and 77; 76 and 78; 76 and 84; 76 and 85; 76 and 86; 76 and 87; 76 and 88; 76 and 89; 76 and 90; 76 and 91; 76 and 92; 76 and 93; 76 and 94; 76 and 95; 76 and 96; 76 and 97; 76 and 98; 76 and 99; 76 and 100; 76 and 101; 76 and 102; 77 and 78; 77 and 84; 77 and 85; 77 and 86; 77 and 87; 77 and 88; 77 and 89; 77 and 90; 77 and 91; 77 and 92; 77 and 93; 77 and 94; 77 and 95; 77 and 96; 77 and 97; 77 and 98; 77 and 99; 77 and 100; 77 and 101; 77 and 102; 78 and 84; 78 and 85; 78 and 86; 78 and 87; 78 and 88; 78 and 89; 78 and 90; 78 and 91; 78 and 92; 78 and 93; 78 and 94; 78 and 95; 78 and 96; 78 and 97; 78 and 98; 78 and 99; 78 and 100; 78 and 101; 78 and 102; 84 and 85; 84 and 86; 84 and 87; 84 and 88; 84 and 89; 84 and 90; 84 and 91; 84 and 92; 84 and 93; 84 and 94; 84 and 95; 84 and 96; 84 and 97; 84 and 98; 84 and 99; 84 and 100; 84 and 101; 84 and 102; 85 and 86; 85 and 87; 85 and 88; 85 and 89; 85 and 90; 85 and 91; 85 and 92; 85 and 93; 85 and 94; 85 and 95; 85 and 96; 85 and 97; 85 and 98; 85 and 99; 85 and 100; 85 and 101; 85 and 102; 86 and 87; 86 and 88; 86 and 89; 86 and 90; 86 and 91; 86 and 92; 86 and 93; 86 and 94; 86 and 95; 86 and 96; 86 and 97; 86 and 98; 86 and 99; 86 and 100; 86 and 101; 86 and 102; 87 and 88; 87 and 89; 87 and 90; 87 and 91; 87 and 92; 87 and 93; 87 and 94; 87 and 95; 87 and 96; 87 and 97; 87 and 98; 87 and 99; 87 and 100; 87 and 101; 87 and 102; 88 and 89; 88 and 90; 88 and 91; 88 and 92; 88 and 93; 88 and 94; 88 and 95; 88 and 96; 88 and 97; 88 and 98; 88 and 99; 88 and 100; 88 and 101; 88 and 102; 89 and 90; 89 and 91; 89 and 92; 89 and 93; 89 and 94; 89 and 95; 89 and 96; 89 and 97; 89 and 98; 89 and 99; 89 and 100; 89 and 101; 89 and 102; 90 and 91; 90 and 92; 90 and 93; 90 and 94; 90 and 95; 90 and 96; 90 and 97; 90 and 98; 90 and 99; 90 and 100; 90 and 101; 90 and 102; 91 and 92; 91 and 93; 91 and 94; 91 and 95; 91 and 96; 91 and 97; 91 and 98; 91 and 99; 91 and 100; 91 and 101; 91 and 102; 92 and 93; 92 and 94; 92 and 95; 92 and 96; 92 and 97; 92 and 98; 92 and 99; 92 and 100; 92 and 101; 92 and 102; 93 and 94; 93 and 95; 93 and 96; 93 and 97; 93 and 98; 93 and 99; 93 and 100; 93 and 101; 93 and 102; 94 and 95; 94 and 96; 94 and 97; 94 and 98; 94 and 99; 94 and 100; 94 and 101; 94 and 102; 95 and 96; 95 and 97; 95 and 98; 95 and 99; 95 and 100; 95 and 101; 95 and 102; 96 and 97; 96 and 98; 96 and 99; 96 and 100; 96 and 101; 96 and 102; 97 and 98; 97 and 99; 97 and 100; 97 and 101; 97 and 102; 98 and 99; 98 and 100; 98 and 101; 98 and 102; 99 and 100; 99 and 101; 99 and 102; 100 and 101; 100 and 102; 101 and 102;
[0159] j. For exon 53 (with, e.g., SluCas9), SEQ ID NOs: 270 and 271; 270 and 272; 270 and 273; 270 and 274; 270 and 275; 270 and 276; 270 and 277; 270 and 278; 270 and 279; 270 and 280; 270 and 281; 270 and 282; 270 and 283; 270 and 284; 270 and 285; 270 and 286; 270 and 287; 270 and 288; 270 and 289; 270 and 290; 270 and 291; 270 and 292; 271 and 272; 271 and 273; 271 and 274; 271 and 275; 271 and 276; 271 and 277; 271 and 278; 271 and 279; 271 and 280; 271 and 281; 271 and 282; 271 and 283; 271 and 284; 271 and 285; 271 and 286; 271 and 287; 271 and 288; 271 and 289; 271 and 290; 271 and 291; 271 and 292; 272 and 273; 272 and 274; 272 and 275; 272 and 276; 272 and 277; 272 and 278; 272 and 279; 272 and 280; 272 and 281; 272 and 282; 272 and 283; 272 and 284; 272 and 285; 272 and 286; 272 and 287; 272 and 288; 272 and 289; 272 and 290; 272 and 291; 272 and 292; 273 and 274; 273 and 275; 273 and 276; 273 and 277; 273 and 278; 273 and 279; 273 and 280; 273 and 281; 273 and 282; 273 and 283; 273 and 284; 273 and 285; 273 and 286; 273 and 287; 273 and 288; 273 and 289; 273 and 290; 273 and 291; 273 and 292; 274 and 275; 274 and 276; 274 and 277; 274 and 278; 274 and 279; 274 and 280; 274 and 281; 274 and 282; 274 and 283; 274 and 284; 274 and 285; 274 and 286; 274 and 287; 274 and 288; 274 and 289; 274 and 290; 274 and 291; 274 and 292; 275 and 276; 275 and 277; 275 and 278; 275 and 279; 275 and 280; 275 and 281; 275 and 282; 275 and 283; 275 and 284; 275 and 285; 275 and 286; 275 and 287; 275 and 288; 275 and 289; 275 and 290; 275 and 291; 275 and 292; 276 and 277; 276 and 278; 276 and 279; 276 and 280; 276 and 281; 276 and 282; 276 and 283; 276 and 284; 276 and 285; 276 and 286; 276 and 287; 276 and 288; 276 and 289; 276 and 290; 276 and 291; 276 and 292; 277 and 278; 277 and 279; 277 and 280; 277 and 281; 277 and 282; 277 and 283; 277 and 284; 277 and 285; 277 and 286; 277 and 287; 277 and 288; 277 and 289; 277 and 290; 277 and 291; 277 and 292; 278 and 279; 278 and 280; 278 and 281; 278 and 282; 278 and 283; 278 and 284; 278 and 285; 278 and 286; 278 and 287; 278 and 288; 278 and 289; 278 and 290; 278 and 291; 278 and 292; 279 and 280; 279 and 281; 279 and 282; 279 and 283; 279 and 284; 279 and 285; 279 and 286; 279 and 287; 279 and 288; 279 and 289; 279 and 290; 279 and 291; 279 and 292; 280 and 281; 280 and 282; 280 and 283; 280 and 284; 280 and 285; 280 and 286; 280 and 287; 280 and 288; 280 and 289; 280 and 290; 280 and 291; 280 and 292; 281 and 282; 281 and 283; 281 and 284; 281 and 285; 281 and 286; 281 and 287; 281 and 288; 281 and 289; 281 and 290; 281 and 291; 281 and 292; 282 and 283; 282 and 284; 282 and 285; 282 and 286; 282 and 287; 282 and 288; 282 and 289; 282 and 290; 282 and 291; 282 and 292; 283 and 284; 283 and 285; 283 and 286; 283 and 287; 283 and 288; 283 and 289; 283 and 290; 283 and 291; 283 and 292; 284 and 285; 284 and 286; 284 and 287; 284 and 288; 284 and 289; 284 and 290; 284 and 291; 284 and 292; 285 and 286; 285 and 287; 285 and 288; 285 and 289; 285 and 290; 285 and 291; 285 and 292; 286 and 287; 286 and 288; 286 and 289; 286 and 290; 286 and 291; 286 and 292; 287 and 288; 287 and 289; 287 and 290; 287 and 291; 287 and 292; 288 and 289; 288 and 290; 288 and 291; 288 and 292; 289 and 290; 289 and 291; 289 and 292; 290 and 291; 290 and 292; 291 and 292; 924 and 270; 924 and 272; 924 and 273; 924 and 274; 924 and 275; 924 and 276; 924 and 277; 924 and 278; 924 and 279; 924 and 280; 924 and 281; 924 and 282; 924 and 283; 924 and 284; 924 and 285; 924 and 286; 924 and 287; 924 and 288; 924 and 289; 924 and 290; 924 and 291; 924 and 292; 925 and 270; 925 and 272; 925 and 273; 925 and 274; 925 and 275; 925 and 276; 925 and 277; 925 and 278; 925 and 279; 925 and 280; 925 and 281; 925 and 282; 925 and 283; 925 and 284; 925 and 285; 925 and 286; 925 and 287; 925 and 288; 925 and 289; 925 and 290; 925 and 291; 925 and 292; 926 and 270; 926 and 272; 926 and 273; 926 and 274; 926 and 275; 926 and 276; 926 and 277; 926 and 278; 926 and 279; 926 and 280; 926 and 281; 926 and 282; 926 and 283; 926 and 284; 926 and 285; 926 and 286; 926 and 287; 926 and 288; 926 and 289; 926 and 290; 926 and 291; 926 and 292; 927 and 270; 927 and 272; 927 and 273; 927 and 274; 927 and 275; 927 and 276; 927 and 277; 927 and 278; 927 and 279; 927 and 280; 927 and 281; 927 and 282; 927 and 283; 927 and 284; 927 and 285; 927 and 286; 927 and 287; 927 and 288; 927 and 289; 927 and 290; 927 and 291; 927 and 292; 928 and 270; 928 and 272; 928 and 273; 928 and 274; 928 and 275; 928 and 276; 928 and 277; 928 and 278; 928 and 279; 928 and 280; 928 and 281; 928 and 282; 928 and 283; 928 and 284; 928 and 285; 928 and 286; 928 and 287; 928 and 288; 928 and 289; 928 and 290; 928 and 291; 928 and 292; 929 and 270; 929 and 272; 929 and 273; 929 and 274; 929 and 275; 929 and 276; 929 and 277; 929 and 278; 929 and 279; 929 and 280; 929 and 281; 929 and 282; 929 and 283; 929 and 284; 929 and 285; 929 and 286; 929 and 287; 929 and 288; 929 and 289; 929 and 290; 929 and 291; 929 and 292; 930 and 270; 930 and 272; 930 and 273; 930 and 274; 930 and 275; 930 and 276; 930 and 277; 930 and 278; 930 and 279; 930 and 280; 930 and 281; 930 and 282; 930 and 283; 930 and 284; 930 and 285; 930 and 286; 930 and 287; 930 and 288; 930 and 289; 930 and 290; 930 and 291; 930 and 292; 931 and 270; 931 and 272; 931 and 273; 931 and 274; 931 and 275; 931 and 276; 931 and 277; 931 and 278; 931 and 279; 931 and 280; 931 and 281; 931 and 282; 931 and 283; 931 and 284; 931 and 285; 931 and 286; 931 and 287; 931 and 288; 931 and 289; 931 and 290; 931 and 291; 931 and 292; 932 and 270; 932 and 272; 932 and 273; 932 and 274; 932 and 275; 932 and 276; 932 and 277; 932 and 278; 932 and 279; 932 and 280; 932 and 281; 932 and 282; 932 and 283; 932 and 284; 932 and 285; 932 and 286; 932 and 287; 932 and 288; 932 and 289; 932 and 290; 932 and 291; 932 and 292; 933 and 270; 933 and 272; 933 and 273; 933 and 274; 933 and 275; 933 and 276; 933 and 277; 933 and 278; 933 and 279; 933 and 280; 933 and 281; 933 and 282; 933 and 283; 933 and 284; 933 and 285; 933 and 286; 933 and 287; 933 and 288; 933 and 289; 933 and 290; 933 and 291; 933 and 292; 934 and 270; 934 and 272; 934 and 273; 934 and 274; 934 and 275; 934 and 276; 934 and 277; 934 and 278; 934 and 279; 934 and 280; 934 and 281; 934 and 282; 934 and 283; 934 and 284; 934 and 285; 934 and 286; 934 and 287; 934 and 288; 934 and 289; 934 and 290; 934 and 291; 934 and 292; 935 and 270; 935 and 272; 935 and 273; 935 and 274; 935 and 275; 935 and 276; 935 and 277; 935 and 278; 935 and 279; 935 and 280; 935 and 281; 935 and 282; 935 and 283; 935 and 284; 935 and 285; 935 and 286; 935 and 287; 935 and 288; 935 and 289; 935 and 290; 935 and 291; 935 and 292; 936 and 270; 936 and 272; 936 and 273; 936 and 274; 936 and 275; 936 and 276; 936 and 277; 936 and 278; 936 and 279; 936 and 280; 936 and 281; 936 and 282; 936 and 283; 936 and 284; 936 and 285; 936 and 286; 936 and 287; 936 and 288; 936 and 289; 936 and 290; 936 and 291; 936 and 292; 937 and 270; 937 and 272; 937 and 273; 937 and 274; 937 and 275; 937 and 276; 937 and 277; 937 and 278; 937 and 279; 937 and 280; 937 and 281; 937 and 282; 937 and 283; 937 and 284; 937 and 285; 937 and 286; 937 and 287; 937 and 288; 937 and 289; 937 and 290; 937 and 291; 937 and 292; 938 and 270; 938 and 272; 938 and 273; 938 and 274; 938 and 275; 938 and 276; 938 and 277; 938 and 278; 938 and 279; 938 and 280; 938 and 281; 938 and 282; 938 and 283; 938 and 284; 938 and 285; 938 and 286; 938 and 287; 938 and 288; 938 and 289; 938 and 290; 938 and 291; 938 and 292; 950 and 275; 951 and 275; 952 and 275; 953 and 275; 954 and 275; or 955 and 275;
[0160] k. For exon 44 (with, e.g., SluCas9), SEQ ID NOs: 200 and 203; 200 and 204; 202 and 203; 202 and 205; 202 and 206; 202 and 207; 204 and 208; 204 and 205; 204 and 206; 204 and 207; or 204 and 208;
[0161] l. For exon 45 (with, e.g., SluCas9), SEQ ID NOs: 223 and 230; or 224 and 212.
[0162] m. For exon 50 (with, e.g., SluCas9), SEQ ID NOs: 231 and 232; 231 and 234; 231 and 236; 231 and 237; 236 and 233; 236 and 235; 236 and 238; 236 and 240; or 236 and 241;
[0163] n. For exon 51 (with, e.g., SaCas9), SEQ ID NOs: 28 and 57; 31 and 57; 31 and 46; 32 and 69; 33 and 57; 33 and 69; 34 and 57; 36 and 69; 37 and 69; 37 and 46; 39 and 46; 40 and 46; 46 and 35; 46 and 62; 46 and 65; 46 and 67; 47 and 57; 48 and 57; 49 and 57; 51 and 57; 53 and 46; 54 and 46; 55 and 46; 58 and 46; 59 and 46; 60 and 46; 61 and 69; or 69 and 30;
[0164] o. For exon 51 (with, e.g., SluCas9), SEQ ID NOs: 243 and 252; 245 and 252; 252 and 253; 252 and 254; 252 and 256; 252 and 257; 252 and 258; 252 and 262; 252 and 264; 252 and 265; or 252 and 266;
[0165] p. For exon 53 (with, e.g., SaCas9), SEQ ID NOs: 86 and 96; 87 and 96; 88 and 97; 89 and 96; 90 and 97; 92 and 77; 92 and 78; 92 and 96; 92 and 99; 93 and 98; 93 and 102; 94 and 100; 95 and 77; 95 and 78; 95 and 99; 96 and 100; 97 and 98; 97 and 102; 98 and 73; or 102 and 73; and
[0166] q. For exon 53 (e.g., with SluCas9), SEQ ID NOs: 278 and 290; 278 and 292; 281 and 291; 283 and 290; 283 and 292; 287 and 291; 272 and 290; 290 and 291; or 272 and 292.

[0167] In some embodiments, a composition is provided comprising or consisting of at least two nucleic acid molecules comprising a first nucleic acid encoding Staphylococcus aureus Cas9 (SaCas9) or Staphylococcus lugdunensis (SluCas9) and i) a nucleic acid encoding at least one, at least two, or at least three guide RNAs; or ii) a nucleic acid encoding from one to n guide RNAs, wherein n is no more than the maximum number of guide RNAs that can be expressed from said nucleic acid; or iii) a nucleic acid encoding one to three guide RNAs; and a second nucleic acid that does not encode a SaCas9 or SluCas9, optionally wherein the second nucleic acid comprises any one of i) at least one, at least two, at least three, at least four, at least five, or at least six guide RNAs; or ii) from one to n guide RNAs, wherein n is no more than the maximum number of guide RNAs that can be expressed from said nucleic acid; or iii) from one to six guide RNAs, wherein in each instance, the guide RNAs comprises nucleic acid encoding at least one, at least two, or two guide sequence of Table 6. In some embodiments, at least one of the two nucleic acid molecules comprise nucleic acid encoding any one of the following pairs of guide sequences:
[0168] a. For exon 44 (e.g., with SaCas9), SEQ ID NOs: 1 and 3; 110 and 120; 110 and 121; 110 and 122; 110 and 123; 110 and 124; 110 and 125; 111 and 112; 111 and 113; 111 and 114; 111 and 115; 111 and 116; 111 and 117; 111 and 118; 111 and 119; 111 and 120; 111 and 121; 111 and 122; 111 and 123; 111 and 124; 111 and 125; 112 and 113; 112 and 114; 112 and 115; 112 and 116; 112 and 117; 112 and 118; 112 and 119; 112 and 120; 112 and 121; 112 and 122; 112 and 123; 112 and 124; 112 and 125; 113 and 114; 113 and 115; 113 and 116; 113 and 117; 113 and 118; 113 and 119; 113 and 120; 113 and 121; 113 and 122; 113 and 123; 113 and 124; 113 and 125; 114 and 115; 114 and 116; 114 and 117; 114 and 118; 114 and 119; 114 and 120; 114 and 121; 114 and 122; 114 and 123; 114 and 124; 114 and 125; 115 and 116; 115 and 117; 115 and 118; 115 and 119; 115 and 120; 115 and 121; 115 and 122; 115 and 123; 115 and 124; 115 and 125; 116 and 117; 116 and 118; 116 and 119; 116 and 120; 116 and 121; 116 and 122; 116 and 123; 116 and 124; 116 and 125; 117 and 118; 117 and 119; 117 and 120; 117 and 121; 117 and 122; 117 and 123; 117 and 124; 117 and 125; 118 and 119; 118 and 120; 118 and 121; 118 and 122; 118 and 123; 118 and 124; 118 and 125; 119 and 120; 119 and 121; 119 and 122; 119 and 123; 119 and 124; 119 and 125; 120 and 121; 120 and 122; 120 and 123; 120 and 124; 120 and 125; 121 and 122; 121 and 123; 121 and 124; 121 and 125; 122 and 123; 122 and 124; 122 and 125; 123 and 124; 123 and 125; 124 and 125;
[0169] b. For exon 44 (e.g., with SluCas9), SEQ ID NOs: 200 and 201; 200 and 202; 200 and 203; 200 and 204; 200 and 205; 200 and 206; 200 and 207; 200 and 208; 201 and 202; 201 and 203; 201 and 204; 201 and 205; 201 and 206; 201 and 207; 201 and 208; 202 and 203; 202 and 204; 202 and 205; 202 and 206; 202 and 207; 202 and 208; 203 and 204; 203 and 205; 203 and 206; 203 and 207; 203 and 208; 204 and 205; 204 and 206; 204 and 207; 204 and 208; 205 and 206; 205 and 207; 205 and 208; 206 and 207; 206 and 208; 207 and 208;
[0170] c. For exon 45 (e.g., with SaCas9), SEQ ID NOs: 3 and 4; 3 and 5; 3 and 6; 3 and 7; 3 and 8; 3 and 9; 4 and 5; 4 and 6; 4 and 7; 4 and 8; 4 and 9; 5 and 6; 5 and 7; 5 and 8; 5 and 9; 6 and 7; 6 and 8; 6 and 9; 7 and 8; 7 and 9; 8 and 9; 126 and 127; 126 and 128; 126 and 129; 126 and 130; 126 and 131; 126 and 132; 126 and 133; 126 and 134; 126 and 135; 126 and 136; 126 and 137; 126 and 138; 126 and 139; 126 and 140; 126 and 141; 126 and 142; 126 and 143; 126 and 144; 126 and 145; 126 and 146; 126 and 147; 127 and 128; 127 and 129; 127 and 130; 127 and 131; 127 and 132; 127 and 133; 127 and 134; 127 and 135; 127 and 136; 127 and 137; 127 and 138; 127 and 139; 127 and 140; 127 and 141; 127 and 142; 127 and 143; 127 and 144; 127 and 145; 127 and 146; 127 and 147; 128 and 129; 128 and 130; 128 and 131; 128 and 132; 128 and 133; 128 and 134; 128 and 135; 128 and 136; 128 and 137; 128 and 138; 128 and 139; 128 and 140; 128 and 141; 128 and 142; 128 and 143; 128 and 144; 128 and 145; 128 and 146; 128 and 147; 129 and 130; 129 and 131; 129 and 132; 129 and 133; 129 and 134; 129 and 135; 129 and 136; 129 and 137; 129 and 138; 129 and 139; 129 and 140; 129 and 141; 129 and 142; 129 and 143; 129 and 144; 129 and 145; 129 and 146; 129 and 147; 130 and 131; 130 and 132; 130 and 133; 130 and 134; 130 and 135; 130 and 136; 130 and 137; 130 and 138; 130 and 139; 130 and 140; 130 and 141; 130 and 142; 130 and 143; 130 and 144; 130 and 145; 130 and 146; 130 and 147; 131 and 132; 131 and 133; 131 and 134; 131 and 135; 131 and 136; 131 and 137; 131 and 138; 131 and 139; 131 and 140; 131 and 141; 131 and 142; 131 and 143; 131 and 144; 131 and 145; 131 and 146; 131 and 147; 132 and 133; 132 and 134; 132 and 135; 132 and 136; 132 and 137; 132 and 138; 132 and 139; 132 and 140; 132 and 141; 132 and 142; 132 and 143; 132 and 144; 132 and 145; 132 and 146; 132 and 147; 133 and 134; 133 and 135; 133 and 136; 133 and 137; 133 and 138; 133 and 139; 133 and 140; 133 and 141; 133 and 142; 133 and 143; 133 and 144; 133 and 145; 133 and 146; 133 and 147; 134 and 135; 134 and 136; 134 and 137; 134 and 138; 134 and 139; 134 and 140; 134 and 141; 134 and 142; 134 and 143; 134 and 144; 134 and 145; 134 and 146; 134 and 147; 135 and 136; 135 and 137; 135 and 138; 135 and 139; 135 and 140; 135 and 141; 135 and 142; 135 and 143; 135 and 144; 135 and 145; 135 and 146; 135 and 147; 136 and 137; 136 and 138; 136 and 139; 136 and 140; 136 and 141; 136 and 142; 136 and 143; 136 and 144; 136 and 145; 136 and 146; 136 and 147; 137 and 138; 137 and 139; 137 and 140; 137 and 141; 137 and 142; 137 and 143; 137 and 144; 137 and 145; 137 and 146; 137 and 147; 138 and 139; 138 and 140; 138 and 141; 138 and 142; 138 and 143; 138 and 144; 138 and 145; 138 and 146; 138 and 147; 139 and 140; 139 and 141; 139 and 142; 139 and 143; 139 and 144; 139 and 145; 139 and 146; 139 and 147; 140 and 141; 140 and 142; 140 and 143; 140 and 144; 140 and 145; 140 and 146; 140 and 147; 141 and 142; 141 and 143; 141 and 144; 141 and 145; 141 and 146; 141 and 147; 142 and 143; 142 and 144; 142 and 145; 142 and 146; 142 and 147; 143 and 144; 143 and 145; 143 and 146; 143 and 147; 144 and 145; 144 and 146; 144 and 147; 145 and 146; 145 and 147; 146 and 147;
[0171] d. For exon 45 (e.g., with SluCas9), SEQ ID NOs: 209 and 210; 209 and 211; 209 and 212; 209 and 213; 209 and 214; 209 and 215; 209 and 216; 209 and 217; 209 and 218; 209 and 219; 209 and 220; 209 and 221; 209 and 222; 209 and 223; 209 and 224; 209 and 225; 209 and 226; 209 and 227; 209 and 228; 209 and 229; 209 and 230; 210 and 211; 210 and 212; 210 and 213; 210 and 214; 210 and 215; 210 and 216; 210 and 217; 210 and 218; 210 and 219; 210 and 220; 210 and 221; 210 and 222; 210 and 223; 210 and 224; 210 and 225; 210 and 226; 210 and 227; 210 and 228; 210 and 229; 210 and 230; 211 and 212; 211 and 213; 211 and 214; 211 and 215; 211 and 216; 211 and 217; 211 and 218; 211 and 219; 211 and 220; 211 and 221; 211 and 222; 211 and 223; 211 and 224; 211 and 225; 211 and 226; 211 and 227; 211 and 228; 211 and 229; 211 and 230; 212 and 213; 212 and 214; 212 and 215; 212 and 216; 212 and 217; 212 and 218; 212 and 219; 212 and 220; 212 and 221; 212 and 222; 212 and 223; 212 and 224; 212 and 225; 212 and 226; 212 and 227; 212 and 228; 212 and 229; 212 and 230; 213 and 214; 213 and 215; 213 and 216; 213 and 217; 213 and 218; 213 and 219; 213 and 220; 213 and 221; 213 and 222; 213 and 223; 213 and 224; 213 and 225; 213 and 226; 213 and 227; 213 and 228; 213 and 229; 213 and 230; 214 and 215; 214 and 216; 214 and 217; 214 and 218; 214 and 219; 214 and 220; 214 and 221; 214 and 222; 214 and 223; 214 and 224; 214 and 225; 214 and 226; 214 and 227; 214 and 228; 214 and 229; 214 and 230; 215 and 216; 215 and 217; 215 and 218; 215 and 219; 215 and 220; 215 and 221; 215 and 222; 215 and 223; 215 and 224; 215 and 225; 215 and 226; 215 and 227; 215 and 228; 215 and 229; 215 and 230; 216 and 217; 216 and 218; 216 and 219; 216 and 220; 216 and 221; 216 and 222; 216 and 223; 216 and 224; 216 and 225; 216 and 226; 216 and 227; 216 and 228; 216 and 229; 216 and 230; 217 and 218; 217 and 219; 217 and 220; 217 and 221; 217 and 222; 217 and 223; 217 and 224; 217 and 225; 217 and 226; 217 and 227; 217 and 228; 217 and 229; 217 and 230; 218 and 219; 218 and 220; 218 and 221; 218 and 222; 218 and 223; 218 and 224; 218 and 225; 218 and 226; 218 and 227; 218 and 228; 218 and 229; 218 and 230; 219 and 220; 219 and 221; 219 and 222; 219 and 223; 219 and 224; 219 and 225; 219 and 226; 219 and 227; 219 and 228; 219 and 229; 219 and 230; 220 and 221; 220 and 222; 220 and 223; 220 and 224; 220 and 225; 220 and 226; 220 and 227; 220 and 228; 220 and 229; 220 and 230; 221 and 222; 221 and 223; 221 and 224; 221 and 225; 221 and 226; 221 and 227; 221 and 228; 221 and 229; 221 and 230; 222 and 223; 222 and 224; 222 and 225; 222 and 226; 222 and 227; 222 and 228; 222 and 229; 222 and 230; 223 and 224; 223 and 225; 223 and 226; 223 and 227; 223 and 228; 223 and 229; 223 and 230; 224 and 225; 224 and 226; 224 and 227; 224 and 228; 224 and 229; 224 and 230; 225 and 226; 225 and 227; 225 and 228; 225 and 229; 225 and 230; 226 and 227; 226 and 228; 226 and 229; 226 and 230; 227 and 228; 227 and 229; 227 and 230; 228 and 229; 228 and 230; 229 and 230;
[0172] e. For exon 50 (e.g., with SaCas9), SEQ ID NOs: 148 and 149; 148 and 150; 148 and 151; 148 and 152; 148 and 153; 148 and 154; 148 and 155; 148 and 156; 148 and 157; 148 and 158; 148 and 159; 149 and 150; 149 and 151; 149 and 152; 149 and 153; 149 and 154; 149 and 155; 149 and 156; 149 and 157; 149 and 158; 149 and 159; 150 and 151; 150 and 152; 150 and 153; 150 and 154; 150 and 155; 150 and 156; 150 and 157; 150 and 158; 150 and 159; 151 and 152; 151 and 153; 151 and 154; 151 and 155; 151 and 156; 151 and 157; 151 and 158; 151 and 159; 152 and 153; 152 and 154; 152 and 155; 152 and 156; 152 and 157; 152 and 158; 152 and 159; 153 and 154; 153 and 155; 153 and 156; 153 and 157; 153 and 158; 153 and 159; 154 and 155; 154 and 156; 154 and 157; 154 and 158; 154 and 159; 155 and 156; 155 and 157; 155 and 158; 155 and 159; 156 and 157; 156 and 158; 156 and 159; 157 and 158; 157 and 159; 158 and 159;
[0173] f. For exon 50 (e.g., with SluCas9), SEQ ID NOs: 231 and 232; 231 and 233; 231 and 234; 231 and 235; 231 and 236; 231 and 237; 231 and 238; 231 and 239; 231 and 240; 231 and 241; 231 and 242; 232 and 233; 232 and 234; 232 and 235; 232 and 236; 232 and 237; 232 and 238; 232 and 239; 232 and 240; 232 and 241; 232 and 242; 233 and 234; 233 and 235; 233 and 236; 233 and 237; 233 and 238; 233 and 239; 233 and 240; 233 and 241; 233 and 242; 234 and 235; 234 and 236; 234 and 237; 234 and 238; 234 and 239; 234 and 240; 234 and 241; 234 and 242; 235 and 236; 235 and 237; 235 and 238; 235 and 239; 235 and 240; 235 and 241; 235 and 242; 236 and 237; 236 and 238; 236 and 239; 236 and 240; 236 and 241; 236 and 242; 237 and 238; 237 and 239; 237 and 240; 237 and 241; 237 and 242; 238 and 239; 238 and 240; 238 and 241; 238 and 242; 239 and 240; 239 and 241; 239 and 242; 240 and 241; 240 and 242; 241 and 242;
[0174] g. For exon 51 (e.g., with SaCas9), SEQ ID NOs: 11 and 12; 11 and 13; 11 and 14; 11 and 15; 12 and 13; 12 and 14; 12 and 15; 13 and 14; 13 and 15; 14 and 15; 27 and 28; 27 and 29; 27 and 30; 27 and 31; 27 and 32; 27 and 33; 27 and 34; 27 and 35; 27 and 36; 27 and 37; 27 and 38; 27 and 39; 27 and 40; 27 and 41; 27 and 42; 27 and 43; 27 and 44; 27 and 45; 27 and 46; 27 and 47; 27 and 48; 27 and 53; 27 and 54; 27 and 55; 27 and 56; 27 and 57; 27 and 58; 27 and 59; 27 and 60; 27 and 61; 27 and 62; 27 and 63; 27 and 64; 27 and 65; 27 and 66; 27 and 67; 27 and 68; 27 and 69; 28 and 29; 28 and 30; 28 and 31; 28 and 32; 28 and 33; 28 and 34; 28 and 35; 28 and 36; 28 and 37; 28 and 38; 28 and 39; 28 and 40; 28 and 41; 28 and 42; 28 and 43; 28 and 44; 28 and 45; 28 and 46; 28 and 47; 28 and 48; 28 and 53; 28 and 54; 28 and 55; 28 and 56; 28 and 57; 28 and 58; 28 and 59; 28 and 60; 28 and 61; 28 and 62; 28 and 63; 28 and 64; 28 and 65; 28 and 66; 28 and 67; 28 and 68; 28 and 69; 29 and 30; 29 and 31; 29 and 32; 29 and 33; 29 and 34; 29 and 35; 29 and 36; 29 and 37; 29 and 38; 29 and 39; 29 and 40; 29 and 41; 29 and 42; 29 and 43; 29 and 44; 29 and 45; 29 and 46; 29 and 47; 29 and 48; 29 and 53; 29 and 54; 29 and 55; 29 and 56; 29 and 57; 29 and 58; 29 and 59; 29 and 60; 29 and 61; 29 and 62; 29 and 63; 29 and 64; 29 and 65; 29 and 66; 29 and 67; 29 and 68; 29 and 69; 30 and 31; 30 and 32; 30 and 33; 30 and 34; 30 and 35; 30 and 36; 30 and 37; 30 and 38; 30 and 39; 30 and 40; 30 and 41; 30 and 42; 30 and 43; 30 and 44; 30 and 45; 30 and 46; 30 and 47; 30 and 48; 30 and 53; 30 and 54; 30 and 55; 30 and 56; 30 and 57; 30 and 58; 30 and 59; 30 and 60; 30 and 61; 30 and 62; 30 and 63; 30 and 64; 30 and 65; 30 and 66; 30 and 67; 30 and 68; 30 and 69; 31 and 32; 31 and 33; 31 and 34; 31 and 35; 31 and 36; 31 and 37; 31 and 38; 31 and 39; 31 and 40; 31 and 41; 31 and 42; 31 and 43; 31 and 44; 31 and 45; 31 and 46; 31 and 47; 31 and 48; 31 and 53; 31 and 54; 31 and 55; 31 and 56; 31 and 57; 31 and 58; 31 and 59; 31 and 60; 31 and 61; 31 and 62; 31 and 63; 31 and 64; 31 and 65; 31 and 66; 31 and 67; 31 and 68; 31 and 69; 32 and 33; 32 and 34; 32 and 35; 32 and 36; 32 and 37; 32 and 38; 32 and 39; 32 and 40; 32 and 41; 32 and 42; 32 and 43; 32 and 44; 32 and 45; 32 and 46; 32 and 47; 32 and 48; 32 and 53; 32 and 54; 32 and 55; 32 and 56; 32 and 57; 32 and 58; 32 and 59; 32 and 60; 32 and 61; 32 and 62; 32 and 63; 32 and 64; 32 and 65; 32 and 66; 32 and 67; 32 and 68; 32 and 69; 33 and 34; 33 and 35; 33 and 36; 33 and 37; 33 and 38; 33 and 39; 33 and 40; 33 and 41; 33 and 42; 33 and 43; 33 and 44; 33 and 45; 33 and 46; 33 and 47; 33 and 48; 33 and 53; 33 and 54; 33 and 55; 33 and 56; 33 and 57; 33 and 58; 33 and 59; 33 and 60; 33 and 61; 33 and 62; 33 and 63; 33 and 64; 33 and 65; 33 and 66; 33 and 67; 33 and 68; 33 and 69; 34 and 35; 34 and 36; 34 and 37; 34 and 38; 34 and 39; 34 and 40; 34 and 41; 34 and 42; 34 and 43; 34 and 44; 34 and 45; 34 and 46; 34 and 47; 34 and 48; 34 and 53; 34 and 54; 34 and 55; 34 and 56; 34 and 57; 34 and 58; 34 and 59; 34 and 60; 34 and 61; 34 and 62; 34 and 63; 34 and 64; 34 and 65; 34 and 66; 34 and 67; 34 and 68; 34 and 69; 35 and 36; 35 and 37; 35 and 38; 35 and 39; 35 and 40; 35 and 41; 35 and 42; 35 and 43; 35 and 44; 35 and 45; 35 and 46; 35 and 47; 35 and 48; 35 and 53; 35 and 54; 35 and 55; 35 and 56; 35 and 57; 35 and 58; 35 and 59; 35 and 60; 35 and 61; 35 and 62; 35 and 63; 35 and 64; 35 and 65; 35 and 66; 35 and 67; 35 and 68; 35 and 69; 36 and 37; 36 and 38; 36 and 39; 36 and 40; 36 and 41; 36 and 42; 36 and 43; 36 and 44; 36 and 45; 36 and 46; 36 and 47; 36 and 48; 36 and 53; 36 and 54; 36 and 55; 36 and 56; 36 and 57; 36 and 58; 36 and 59; 36 and 60; 36 and 61; 36 and 62; 36 and 63; 36 and 64; 36 and 65; 36 and 66; 36 and 67; 36 and 68; 36 and 69; 37 and 38; 37 and 39; 37 and 40; 37 and 41; 37 and 42; 37 and 43; 37 and 44; 37 and 45; 37 and 46; 37 and 47; 37 and 48; 37 and 53; 37 and 54; 37 and 55; 37 and 56; 37 and 57; 37 and 58; 37 and 59; 37 and 60; 37 and 61; 37 and 62; 37 and 63; 37 and 64; 37 and 65; 37 and 66; 37 and 67; 37 and 68; 37 and 69; 38 and 39; 38 and 40; 38 and 41; 38 and 42; 38 and 43; 38 and 44; 38 and 45; 38 and 46; 38 and 47; 38 and 48; 38 and 53; 38 and 54; 38 and 55; 38 and 56; 38 and 57; 38 and 58; 38 and 59; 38 and 60; 38 and 61; 38 and 62; 38 and 63; 38 and 64; 38 and 65; 38 and 66; 38 and 67; 38 and 68; 38 and 69; 39 and 40; 39 and 41; 39 and 42; 39 and 43; 39 and 44; 39 and 45; 39 and 46; 39 and 47; 39 and 48; 39 and 53; 39 and 54; 39 and 55; 39 and 56; 39 and 57; 39 and 58; 39 and 59; 39 and 60; 39 and 61; 39 and 62; 39 and 63; 39 and 64; 39 and 65; 39 and 66; 39 and 67; 39 and 68; 39 and 69; 40 and 41; 40 and 42; 40 and 43; 40 and 44; 40 and 45; 40 and 46; 40 and 47; 40 and 48; 40 and 53; 40 and 54; 40 and 55; 40 and 56; 40 and 57; 40 and 58; 40 and 59; 40 and 60; 40 and 61; 40 and 62; 40 and 63; 40 and 64; 40 and 65; 40 and 66; 40 and 67; 40 and 68; 40 and 69; 41 and 42; 41 and 43; 41 and 44; 41 and 45; 41 and 46; 41 and 47; 41 and 48; 41 and 53; 41 and 54; 41 and 55; 41 and 56; 41 and 57; 41 and 58; 41 and 59; 41 and 60; 41 and 61; 41 and 62; 41 and 63; 41 and 64; 41 and 65; 41 and 66; 41 and 67; 41 and 68; 41 and 69; 42 and 43; 42 and 44; 42 and 45; 42 and 46; 42 and 47; 42 and 48; 42 and 53; 42 and 54; 42 and 55; 42 and 56; 42 and 57; 42 and 58; 42 and 59; 42 and 60; 42 and 61; 42 and 62; 42 and 63; 42 and 64; 42 and 65; 42 and 66; 42 and 67; 42 and 68; 42 and 69; 43 and 44; 43 and 45; 43 and 46; 43 and 47; 43 and 48; 43 and 53; 43 and 54; 43 and 55; 43 and 56; 43 and 57; 43 and 58; 43 and 59; 43 and 60; 43 and 61; 43 and 62; 43 and 63; 43 and 64; 43 and 65; 43 and 66; 43 and 67; 43 and 68; 43 and 69; 44 and 45; 44 and 46; 44 and 47; 44 and 48; 44 and 53; 44 and 54; 44 and 55; 44 and 56; 44 and 57; 44 and 58; 44 and 59; 44 and 60; 44 and 61; 44 and 62; 44 and 63; 44 and 64; 44 and 65; 44 and 66; 44 and 67; 44 and 68; 44 and 69; 45 and 46; 45 and 47; 45 and 48; 45 and 53; 45 and 54; 45 and 55; 45 and 56; 45 and 57; 45 and 58; 45 and 59; 45 and 60; 45 and 61; 45 and 62; 45 and 63; 45 and 64; 45 and 65; 45 and 66; 45 and 67; 45 and 68; 45 and 69; 46 and 47; 46 and 48; 46 and 53; 46 and 54; 46 and 55; 46 and 56; 46 and 57; 46 and 58; 46 and 59; 46 and 60; 46 and 61; 46 and 62; 46 and 63; 46 and 64; 46 and 65; 46 and 66; 46 and 67; 46 and 68; 46 and 69; 47 and 48; 47 and 53; 47 and 54; 47 and 55; 47 and 56; 47 and 57; 47 and 58; 47 and 59; 47 and 60; 47 and 61; 47 and 62; 47 and 63; 47 and 64; 47 and 65; 47 and 66; 47 and 67; 47 and 68; 47 and 69; 48 and 53; 48 and 54; 48 and 55; 48 and 56; 48 and 57; 48 and 58; 48 and 59; 48 and 60; 48 and 61; 48 and 62; 48 and 63; 48 and 64; 48 and 65; 48 and 66; 48 and 67; 48 and 68; 48 and 69; 53 and 54; 53 and 55; 53 and 56; 53 and 57; 53 and 58; 53 and 59; 53 and 60; 53 and 61; 53 and 62; 53 and 63; 53 and 64; 53 and 65; 53 and 66; 53 and 67; 53 and 68; 53 and 69; 54 and 55; 54 and 56; 54 and 57; 54 and 58; 54 and 59; 54 and 60; 54 and 61; 54 and 62; 54 and 63; 54 and 64; 54 and 65; 54 and 66; 54 and 67; 54 and 68; 54 and 69; 55 and 56; 55 and 57; 55 and 58; 55 and 59; 55 and 60; 55 and 61; 55 and 62; 55 and 63; 55 and 64; 55 and 65; 55 and 66; 55 and 67; 55 and 68; 55 and 69; 56 and 57; 56 and 58; 56 and 59; 56 and 60; 56 and 61; 56 and 62; 56 and 63; 56 and 64; 56 and 65; 56 and 66; 56 and 67; 56 and 68; 56 and 69; 57 and 58; 57 and 59; 57 and 60; 57 and 61; 57 and 62; 57 and 63; 57 and 64; 57 and 65; 57 and 66; 57 and 67; 57 and 68; 57 and 69; 58 and 59; 58 and 60; 58 and 61; 58 and 62; 58 and 63; 58 and 64; 58 and 65; 58 and 66; 58 and 67; 58 and 68; 58 and 69; 59 and 60; 59 and 61; 59 and 62; 59 and 63; 59 and 64; 59 and 65; 59 and 66; 59 and 67; 59 and 68; 59 and 69; 60 and 61; 60 and 62; 60 and 63; 60 and 64; 60 and 65; 60 and 66; 60 and 67; 60 and 68; 60 and 69; 61 and 62; 61 and 63; 61 and 64; 61 and 65; 61 and 66; 61 and 67; 61 and 68; 61 and 69; 62 and 63; 62 and 64; 62 and 65; 62 and 66; 62 and 67; 62 and 68; 62 and 69; 63 and 64; 63 and 65; 63 and 66; 63 and 67; 63 and 68; 63 and 69; 64 and 65; 64 and 66; 64 and 67; 64 and 68; 64 and 69; 65 and 66; 65 and 67; 65 and 68; 65 and 69; 66 and 67; 66 and 68; 66 and 69; 67 and 68; 67 and 69; 68 and 69;
[0175] h. For exon 51 (e.g., with SluCas9), SEQ ID NOs: 243 and 244; 243 and 245; 243 and 246; 243 and 247; 243 and 248; 243 and 249; 243 and 250; 243 and 251; 243 and 252; 243 and 253; 243 and 254; 243 and 255; 243 and 256; 243 and 257; 243 and 258; 243 and 259; 243 and 260; 243 and 261; 243 and 262; 243 and 263; 243 and 264; 243 and 265; 243 and 266; 243 and 267; 243 and 268; 243 and 269; 244 and 245; 244 and 246; 244 and 247; 244 and 248; 244 and 249; 244 and 250; 244 and 251; 244 and 252; 244 and 253; 244 and 254; 244 and 255; 244 and 256; 244 and 257; 244 and 258; 244 and 259; 244 and 260; 244 and 261; 244 and 262; 244 and 263; 244 and 264; 244 and 265; 244 and 266; 244 and 267; 244 and 268; 244 and 269; 245 and 246; 245 and 247; 245 and 248; 245 and 249; 245 and 250; 245 and 251; 245 and 252; 245 and 253; 245 and 254; 245 and 255; 245 and 256; 245 and 257; 245 and 258; 245 and 259; 245 and 260; 245 and 261; 245 and 262; 245 and 263; 245 and 264; 245 and 265; 245 and 266; 245 and 267; 245 and 268; 245 and 269; 246 and 247; 246 and 248; 246 and 249; 246 and 250; 246 and 251; 246 and 252; 246 and 253; 246 and 254; 246 and 255; 246 and 256; 246 and 257; 246 and 258; 246 and 259; 246 and 260; 246 and 261; 246 and 262; 246 and 263; 246 and 264; 246 and 265; 246 and 266; 246 and 267; 246 and 268; 246 and 269; 247 and 248; 247 and 249; 247 and 250; 247 and 251; 247 and 252; 247 and 253; 247 and 254; 247 and 255; 247 and 256; 247 and 257; 247 and 258; 247 and 259; 247 and 260; 247 and 261; 247 and 262; 247 and 263; 247 and 264; 247 and 265; 247 and 266; 247 and 267; 247 and 268; 247 and 269; 248 and 249; 248 and 250; 248 and 251; 248 and 252; 248 and 253; 248 and 254; 248 and 255; 248 and 256; 248 and 257; 248 and 258; 248 and 259; 248 and 260; 248 and 261; 248 and 262; 248 and 263; 248 and 264; 248 and 265; 248 and 266; 248 and 267; 248 and 268; 248 and 269; 249 and 250; 249 and 251; 249 and 252; 249 and 253; 249 and 254; 249 and 255; 249 and 256; 249 and 257; 249 and 258; 249 and 259; 249 and 260; 249 and 261; 249 and 262; 249 and 263; 249 and 264; 249 and 265; 249 and 266; 249 and 267; 249 and 268; 249 and 269; 250 and 251; 250 and 252; 250 and 253; 250 and 254; 250 and 255; 250 and 256; 250 and 257; 250 and 258; 250 and 259; 250 and 260; 250 and 261; 250 and 262; 250 and 263; 250 and 264; 250 and 265; 250 and 266; 250 and 267; 250 and 268; 250 and 269; 251 and 252; 251 and 253; 251 and 254; 251 and 255; 251 and 256; 251 and 257; 251 and 258; 251 and 259; 251 and 260; 251 and 261; 251 and 262; 251 and 263; 251 and 264; 251 and 265; 251 and 266; 251 and 267; 251 and 268; 251 and 269; 252 and 253; 252 and 254; 252 and 255; 252 and 256; 252 and 257; 252 and 258; 252 and 259; 252 and 260; 252 and 261; 252 and 262; 252 and 263; 252 and 264; 252 and 265; 252 and 266; 252 and 267; 252 and 268; 252 and 269; 253 and 254; 253 and 255; 253 and 256; 253 and 257; 253 and 258; 253 and 259; 253 and 260; 253 and 261; 253 and 262; 253 and 263; 253 and 264; 253 and 265; 253 and 266; 253 and 267; 253 and 268; 253 and 269; 254 and 255; 254 and 256; 254 and 257; 254 and 258; 254 and 259; 254 and 260; 254 and 261; 254 and 262; 254 and 263; 254 and 264; 254 and 265; 254 and 266; 254 and 267; 254 and 268; 254 and 269; 255 and 256; 255 and 257; 255 and 258; 255 and 259; 255 and 260; 255 and 261; 255 and 262; 255 and 263; 255 and 264; 255 and 265; 255 and 266; 255 and 267; 255 and 268; 255 and 269; 256 and 257; 256 and 258; 256 and 259; 256 and 260; 256 and 261; 256 and 262; 256 and 263; 256 and 264; 256 and 265; 256 and 266; 256 and 267; 256 and 268; 256 and 269; 257 and 258; 257 and 259; 257 and 260; 257 and 261; 257 and 262; 257 and 263; 257 and 264; 257 and 265; 257 and 266; 257 and 267; 257 and 268; 257 and 269; 258 and 259; 258 and 260; 258 and 261; 258 and 262; 258 and 263; 258 and 264; 258 and 265; 258 and 266; 258 and 267; 258 and 268; 258 and 269; 259 and 260; 259 and 261; 259 and 262; 259 and 263; 259 and 264; 259 and 265; 259 and 266; 259 and 267; 259 and 268; 259 and 269; 260 and 261; 260 and 262; 260 and 263; 260 and 264; 260 and 265; 260 and 266; 260 and 267; 260 and 268; 260 and 269; 261 and 262; 261 and 263; 261 and 264; 261 and 265; 261 and 266; 261 and 267; 261 and 268; 261 and 269; 262 and 263; 262 and 264; 262 and 265; 262 and 266; 262 and 267; 262 and 268; 262 and 269; 263 and 264; 263 and 265; 263 and 266; 263 and 267; 263 and 268; 263 and 269; 264 and 265; 264 and 266; 264 and 267; 264 and 268; 264 and 269; 265 and 266; 265 and 267; 265 and 268; 265 and 269; 266 and 267; 266 and 268; 266 and 269; 267 and 268; 267 and 269; 268 and 269;
[0176] i. For exon 53 (e.g., with SaCas9), SEQ ID NOs: 16 and 17; 16 and 18; 16 and 19; 16 and 20; 16 and 21; 16 and 22; 16 and 23; 16 and 24; 16 and 25; 16 and 26; 17 and 18; 17 and 19; 17 and 20; 17 and 21; 17 and 22; 17 and 23; 17 and 24; 17 and 25; 17 and 26; 18 and 19; 18 and 20; 18 and 21; 18 and 22; 18 and 23; 18 and 24; 18 and 25; 18 and 26; 19 and 20; 19 and 21; 19 and 22; 19 and 23; 19 and 24; 19 and 25; 19 and 26; 20 and 21; 20 and 22; 20 and 23; 20 and 24; 20 and 25; 20 and 26; 21 and 22; 21 and 23; 21 and 24; 21 and 25; 21 and 26; 22 and 23; 22 and 24; 22 and 25; 22 and 26; 23 and 24; 23 and 25; 23 and 26; 24 and 25; 24 and 26; 25 and 26; 71 and 72; 71 and 73; 71 and 74; 71 and 75; 71 and 76; 71 and 77; 71 and 78; 71 and 84; 71 and 85; 71 and 86; 71 and 87; 71 and 88; 71 and 89; 71 and 90; 71 and 91; 71 and 92; 71 and 93; 71 and 94; 71 and 95; 71 and 96; 71 and 97; 71 and 98; 71 and 99; 71 and 100; 71 and 101; 71 and 102; 72 and 73; 72 and 74; 72 and 75; 72 and 76; 72 and 77; 72 and 78; 72 and 84; 72 and 85; 72 and 86; 72 and 87; 72 and 88; 72 and 89; 72 and 90; 72 and 91; 72 and 92; 72 and 93; 72 and 94; 72 and 95; 72 and 96; 72 and 97; 72 and 98; 72 and 99; 72 and 100; 72 and 101; 72 and 102; 73 and 74; 73 and 75; 73 and 76; 73 and 77; 73 and 78; 73 and 84; 73 and 85; 73 and 86; 73 and 87; 73 and 88; 73 and 89; 73 and 90; 73 and 91; 73 and 92; 73 and 93; 73 and 94; 73 and 95; 73 and 96; 73 and 97; 73 and 98; 73 and 99; 73 and 100; 73 and 101; 73 and 102; 74 and 75; 74 and 76; 74 and 77; 74 and 78; 74 and 84; 74 and 85; 74 and 86; 74 and 87; 74 and 88; 74 and 89; 74 and 90; 74 and 91; 74 and 92; 74 and 93; 74 and 94; 74 and 95; 74 and 96; 74 and 97; 74 and 98; 74 and 99; 74 and 100; 74 and 101; 74 and 102; 75 and 76; 75 and 77; 75 and 78; 75 and 84; 75 and 85; 75 and 86; 75 and 87; 75 and 88; 75 and 89; 75 and 90; 75 and 91; 75 and 92; 75 and 93; 75 and 94; 75 and 95; 75 and 96; 75 and 97; 75 and 98; 75 and 99; 75 and 100; 75 and 101; 75 and 102; 76 and 77; 76 and 78; 76 and 84; 76 and 85; 76 and 86; 76 and 87; 76 and 88; 76 and 89; 76 and 90; 76 and 91; 76 and 92; 76 and 93; 76 and 94; 76 and 95; 76 and 96; 76 and 97; 76 and 98; 76 and 99; 76 and 100; 76 and 101; 76 and 102; 77 and 78; 77 and 84; 77 and 85; 77 and 86; 77 and 87; 77 and 88; 77 and 89; 77 and 90; 77 and 91; 77 and 92; 77 and 93; 77 and 94; 77 and 95; 77 and 96; 77 and 97; 77 and 98; 77 and 99; 77 and 100; 77 and 101; 77 and 102; 78 and 84; 78 and 85; 78 and 86; 78 and 87; 78 and 88; 78 and 89; 78 and 90; 78 and 91; 78 and 92; 78 and 93; 78 and 94; 78 and 95; 78 and 96; 78 and 97; 78 and 98; 78 and 99; 78 and 100; 78 and 101; 78 and 102; 84 and 85; 84 and 86; 84 and 87; 84 and 88; 84 and 89; 84 and 90; 84 and 91; 84 and 92; 84 and 93; 84 and 94; 84 and 95; 84 and 96; 84 and 97; 84 and 98; 84 and 99; 84 and 100; 84 and 101; 84 and 102; 85 and 86; 85 and 87; 85 and 88; 85 and 89; 85 and 90; 85 and 91; 85 and 92; 85 and 93; 85 and 94; 85 and 95; 85 and 96; 85 and 97; 85 and 98; 85 and 99; 85 and 100; 85 and 101; 85 and 102; 86 and 87; 86 and 88; 86 and 89; 86 and 90; 86 and 91; 86 and 92; 86 and 93; 86 and 94; 86 and 95; 86 and 96; 86 and 97; 86 and 98; 86 and 99; 86 and 100; 86 and 101; 86 and 102; 87 and 88; 87 and 89; 87 and 90; 87 and 91; 87 and 92; 87 and 93; 87 and 94; 87 and 95; 87 and 96; 87 and 97; 87 and 98; 87 and 99; 87 and 100; 87 and 101; 87 and 102; 88 and 89; 88 and 90; 88 and 91; 88 and 92; 88 and 93; 88 and 94; 88 and 95; 88 and 96; 88 and 97; 88 and 98; 88 and 99; 88 and 100; 88 and 101; 88 and 102; 89 and 90; 89 and 91; 89 and 92; 89 and 93; 89 and 94; 89 and 95; 89 and 96; 89 and 97; 89 and 98; 89 and 99; 89 and 100; 89 and 101; 89 and 102; 90 and 91; 90 and 92; 90 and 93; 90 and 94; 90 and 95; 90 and 96; 90 and 97; 90 and 98; 90 and 99; 90 and 100; 90 and 101; 90 and 102; 91 and 92; 91 and 93; 91 and 94; 91 and 95; 91 and 96; 91 and 97; 91 and 98; 91 and 99; 91 and 100; 91 and 101; 91 and 102; 92 and 93; 92 and 94; 92 and 95; 92 and 96; 92 and 97; 92 and 98; 92 and 99; 92 and 100; 92 and 101; 92 and 102; 93 and 94; 93 and 95; 93 and 96; 93 and 97; 93 and 98; 93 and 99; 93 and 100; 93 and 101; 93 and 102; 94 and 95; 94 and 96; 94 and 97; 94 and 98; 94 and 99; 94 and 100; 94 and 101; 94 and 102; 95 and 96; 95 and 97; 95 and 98; 95 and 99; 95 and 100; 95 and 101; 95 and 102; 96 and 97; 96 and 98; 96 and 99; 96 and 100; 96 and 101; 96 and 102; 97 and 98; 97 and 99; 97 and 100; 97 and 101; 97 and 102; 98 and 99; 98 and 100; 98 and 101; 98 and 102; 99 and 100; 99 and 101; 99 and 102; 100 and 101; 100 and 102; 101 and 102;
[0177] j. For exon 53 (e.g., with SluCas9), SEQ ID NOs: 270 and 271; 270 and 272; 270 and 273; 270 and 274; 270 and 275; 270 and 276; 270 and 277; 270 and 278; 270 and 279; 270 and 280; 270 and 281; 270 and 282; 270 and 283; 270 and 284; 270 and 285; 270 and 286; 270 and 287; 270 and 288; 270 and 289; 270 and 290; 270 and 291; 270 and 292; 271 and 272; 271 and 273; 271 and 274; 271 and 275; 271 and 276; 271 and 277; 271 and 278; 271 and 279; 271 and 280; 271 and 281; 271 and 282; 271 and 283; 271 and 284; 271 and 285; 271 and 286; 271 and 287; 271 and 288; 271 and 289; 271 and 290; 271 and 291; 271 and 292; 272 and 273; 272 and 274; 272 and 275; 272 and 276; 272 and 277; 272 and 278; 272 and 279; 272 and 280; 272 and 281; 272 and 282; 272 and 283; 272 and 284; 272 and 285; 272 and 286; 272 and 287; 272 and 288; 272 and 289; 272 and 290; 272 and 291; 272 and 292; 273 and 274; 273 and 275; 273 and 276; 273 and 277; 273 and 278; 273 and 279; 273 and 280; 273 and 281; 273 and 282; 273 and 283; 273 and 284; 273 and 285; 273 and 286; 273 and 287; 273 and 288; 273 and 289; 273 and 290; 273 and 291; 273 and 292; 274 and 275; 274 and 276; 274 and 277; 274 and 278; 274 and 279; 274 and 280; 274 and 281; 274 and 282; 274 and 283; 274 and 284; 274 and 285; 274 and 286; 274 and 287; 274 and 288; 274 and 289; 274 and 290; 274 and 291; 274 and 292; 275 and 276; 275 and 277; 275 and 278; 275 and 279; 275 and 280; 275 and 281; 275 and 282; 275 and 283; 275 and 284; 275 and 285; 275 and 286; 275 and 287; 275 and 288; 275 and 289; 275 and 290; 275 and 291; 275 and 292; 276 and 277; 276 and 278; 276 and 279; 276 and 280; 276 and 281; 276 and 282; 276 and 283; 276 and 284; 276 and 285; 276 and 286; 276 and 287; 276 and 288; 276 and 289; 276 and 290; 276 and 291; 276 and 292; 277 and 278; 277 and 279; 277 and 280; 277 and 281; 277 and 282; 277 and 283; 277 and 284; 277 and 285; 277 and 286; 277 and 287; 277 and 288; 277 and 289; 277 and 290; 277 and 291; 277 and 292; 278 and 279; 278 and 280; 278 and 281; 278 and 282; 278 and 283; 278 and 284; 278 and 285; 278 and 286; 278 and 287; 278 and 288; 278 and 289; 278 and 290; 278 and 291; 278 and 292; 279 and 280; 279 and 281; 279 and 282; 279 and 283; 279 and 284; 279 and 285; 279 and 286; 279 and 287; 279 and 288; 279 and 289; 279 and 290; 279 and 291; 279 and 292; 280 and 281; 280 and 282; 280 and 283; 280 and 284; 280 and 285; 280 and 286; 280 and 287; 280 and 288; 280 and 289; 280 and 290; 280 and 291; 280 and 292; 281 and 282; 281 and 283; 281 and 284; 281 and 285; 281 and 286; 281 and 287; 281 and 288; 281 and 289; 281 and 290; 281 and 291; 281 and 292; 282 and 283; 282 and 284; 282 and 285; 282 and 286; 282 and 287; 282 and 288; 282 and 289; 282 and 290; 282 and 291; 282 and 292; 283 and 284; 283 and 285; 283 and 286; 283 and 287; 283 and 288; 283 and 289; 283 and 290; 283 and 291; 283 and 292; 284 and 285; 284 and 286; 284 and 287; 284 and 288; 284 and 289; 284 and 290; 284 and 291; 284 and 292; 285 and 286; 285 and 287; 285 and 288; 285 and 289; 285 and 290; 285 and 291; 285 and 292; 286 and 287; 286 and 288; 286 and 289; 286 and 290; 286 and 291; 286 and 292; 287 and 288; 287 and 289; 287 and 290; 287 and 291; 287 and 292; 288 and 289; 288 and 290; 288 and 291; 288 and 292; 289 and 290; 289 and 291; 289 and 292; 290 and 291; 290 and 292; 291 and 292; 924 and 270; 924 and 272; 924 and 273; 924 and 274; 924 and 275; 924 and 276; 924 and 277; 924 and 278; 924 and 279; 924 and 280; 924 and 281; 924 and 282; 924 and 283; 924 and 284; 924 and 285; 924 and 286; 924 and 287; 924 and 288; 924 and 289; 924 and 290; 924 and 291; 924 and 292; 925 and 270; 925 and 272; 925 and 273; 925 and 274; 925 and 275; 925 and 276; 925 and 277; 925 and 278; 925 and 279; 925 and 280; 925 and 281; 925 and 282; 925 and 283; 925 and 284; 925 and 285; 925 and 286; 925 and 287; 925 and 288; 925 and 289; 925 and 290; 925 and 291; 925 and 292; 926 and 270; 926 and 272; 926 and 273; 926 and 274; 926 and 275; 926 and 276; 926 and 277; 926 and 278; 926 and 279; 926 and 280; 926 and 281; 926 and 282; 926 and 283; 926 and 284; 926 and 285; 926 and 286; 926 and 287; 926 and 288; 926 and 289; 926 and 290; 926 and 291; 926 and 292; 927 and 270; 927 and 272; 927 and 273; 927 and 274; 927 and 275; 927 and 276; 927 and 277; 927 and 278; 927 and 279; 927 and 280; 927 and 281; 927 and 282; 927 and 283; 927 and 284; 927 and 285; 927 and 286; 927 and 287; 927 and 288; 927 and 289; 927 and 290; 927 and 291; 927 and 292; 928 and 270; 928 and 272; 928 and 273; 928 and 274; 928 and 275; 928 and 276; 928 and 277; 928 and 278; 928 and 279; 928 and 280; 928 and 281; 928 and 282; 928 and 283; 928 and 284; 928 and 285; 928 and 286; 928 and 287; 928 and 288; 928 and 289; 928 and 290; 928 and 291; 928 and 292; 929 and 270; 929 and 272; 929 and 273; 929 and 274; 929 and 275; 929 and 276; 929 and 277; 929 and 278; 929 and 279; 929 and 280; 929 and 281; 929 and 282; 929 and 283; 929 and 284; 929 and 285; 929 and 286; 929 and 287; 929 and 288; 929 and 289; 929 and 290; 929 and 291; 929 and 292; 930 and 270; 930 and 272; 930 and 273; 930 and 274; 930 and 275; 930 and 276; 930 and 277; 930 and 278; 930 and 279; 930 and 280; 930 and 281; 930 and 282; 930 and 283; 930 and 284; 930 and 285; 930 and 286; 930 and 287; 930 and 288; 930 and 289; 930 and 290; 930 and 291; 930 and 292; 931 and 270; 931 and 272; 931 and 273; 931 and 274; 931 and 275; 931 and 276; 931 and 277; 931 and 278; 931 and 279; 931 and 280; 931 and 281; 931 and 282; 931 and 283; 931 and 284; 931 and 285; 931 and 286; 931 and 287; 931 and 288; 931 and 289; 931 and 290; 931 and 291; 931 and 292; 932 and 270; 932 and 272; 932 and 273; 932 and 274; 932 and 275; 932 and 276; 932 and 277; 932 and 278; 932 and 279; 932 and 280; 932 and 281; 932 and 282; 932 and 283; 932 and 284; 932 and 285; 932 and 286; 932 and 287; 932 and 288; 932 and 289; 932 and 290; 932 and 291; 932 and 292; 933 and 270; 933 and 272; 933 and 273; 933 and 274; 933 and 275; 933 and 276; 933 and 277; 933 and 278; 933 and 279; 933 and 280; 933 and 281; 933 and 282; 933 and 283; 933 and 284; 933 and 285; 933 and 286; 933 and 287; 933 and 288; 933 and 289; 933 and 290; 933 and 291; 933 and 292; 934 and 270; 934 and 272; 934 and 273; 934 and 274; 934 and 275; 934 and 276; 934 and 277; 934 and 278; 934 and 279; 934 and 280; 934 and 281; 934 and 282; 934 and 283; 934 and 284; 934 and 285; 934 and 286; 934 and 287; 934 and 288; 934 and 289; 934 and 290; 934 and 291; 934 and 292; 935 and 270; 935 and 272; 935 and 273; 935 and 274; 935 and 275; 935 and 276; 935 and 277; 935 and 278; 935 and 279; 935 and 280; 935 and 281; 935 and 282; 935 and 283; 935 and 284; 935 and 285; 935 and 286; 935 and 287; 935 and 288; 935 and 289; 935 and 290; 935 and 291; 935 and 292; 936 and 270; 936 and 272; 936 and 273; 936 and 274; 936 and 275; 936 and 276; 936 and 277; 936 and 278; 936 and 279; 936 and 280; 936 and 281; 936 and 282; 936 and 283; 936 and 284; 936 and 285; 936 and 286; 936 and 287; 936 and 288; 936 and 289; 936 and 290; 936 and 291; 936 and 292; 937 and 270; 937 and 272; 937 and 273; 937 and 274; 937 and 275; 937 and 276; 937 and 277; 937 and 278; 937 and 279; 937 and 280; 937 and 281; 937 and 282; 937 and 283; 937 and 284; 937 and 285; 937 and 286; 937 and 287; 937 and 288; 937 and 289; 937 and 290; 937 and 291; 937 and 292; 938 and 270; 938 and 272; 938 and 273; 938 and 274; 938 and 275; 938 and 276; 938 and 277; 938 and 278; 938 and 279; 938 and 280; 938 and 281; 938 and 282; 938 and 283; 938 and 284; 938 and 285; 938 and 286; 938 and 287; 938 and 288; 938 and 289; 938 and 290; 938 and 291; 938 and 292; 950 and 275; 951 and 275; 952 and 275; 953 and 275; 954 and 275; or 955 and 275;
[0178] k. For exon 44 (e.g., with SluCas9), SEQ ID NOs: 200 and 203; 200 and 204; 202 and 203; 202 and 205; 202 and 206; 202 and 207; 204 and 208; 204 and 205; 204 and 206; 204 and 207; or 204 and 208;
[0179] l. For exon 45 (e.g., with SluCas9), SEQ ID NOs: 223 and 230; or 224 and 212.
[0180] m. For exon 50 with SluCas9, SEQ ID NOs: 231 and 232; 231 and 234; 231 and 236; 231 and 237; 236 and 233; 236 and 235; 236 and 238; 236 and 240; or 236 and 241;
[0181] n. For exon 51 (e.g., with SaCas9), SEQ ID NOs: 28 and 57; 31 and 57; 31 and 46; 32 and 69; 33 and 57; 33 and 69; 34 and 57; 36 and 69; 37 and 69; 37 and 46; 39 and 46; 40 and 46; 46 and 35; 46 and 62; 46 and 65; 46 and 67; 47 and 57; 48 and 57; 49 and 57; 51 and 57; 53 and 46; 54 and 46; 55 and 46; 58 and 46; 59 and 46; 60 and 46; 61 and 69; or 69 and 30;
[0182] o. For exon 51 (e.g., with SluCas9), SEQ ID NOs: 243 and 252; 245 and 252; 252 and 253; 252 and 254; 252 and 256; 252 and 257; 252 and 258; 252 and 262; 252 and 264; 252 and 265; or 252 and 266;
[0183] p. For exon 53 (e.g., with SaCas9), SEQ ID NOs: 86 and 96; 87 and 96; 88 and 97; 89 and 96; 90 and 97; 92 and 77; 92 and 78; 92 and 96; 92 and 99; 93 and 98; 93 and 102; 94 and 100; 95 and 77; 95 and 78; 95 and 99; 96 and 100; 97 and 98; 97 and 102; 98 and 73; or 102 and 73; and
[0184] q. For exon 53 (e.g., with SluCas9), SEQ ID NOs: 278 and 290; 278 and 292; 281 and 291; 283 and 290; 283 and 292; 287 and 291; 272 and 290; 290 and 291; or 272 and 292.

[0185] The disclosure herein may reference a “first and a second spacer” or a “first and a second guide RNA, gRNA, or sgRNA” followed by one or more pairs of specific sequences. It should be noted that the order of the sequences in the pair is not intended to be restricted to the order in which they are presented/described. For example, the phrase “the first sgRNA and the second sgRNA comprise the sequences of SEQ ID NOs: 10 and 15” could mean that the first sgRNA comprises the sequence of SEQ ID NO: 10 and the second sgRNA sequence comprises the sequence of SEQ ID NO: 15, or this phrase could mean that the first sgRNA comprises the sequence of SEQ ID NO: 15 and the second sgRNA sequence comprises the sequence of SEQ ID NO: 10.

[0186] In some embodiments, the first and/or the second nucleic acid, if present, comprises at least two guide RNAs. In some embodiments, the first and/or the second nucleic acid, if present, comprises at least three guide RNAs. In some embodiments, the first and/or the second nucleic acid, if present, comprises at least four guide RNAs. In some embodiments, the first and/or the second nucleic acid, if present, comprises at least five guide RNAs. In some embodiments, the first and/or the second nucleic acid, if present, comprises at least six guide RNAs. In some embodiments, the first nucleic acid encodes an endonuclease and at least one, at least two, or at least three guide RNAs. In some embodiments, the first nucleic acid comprises an endonuclease and from one to n guide RNAs, wherein n is no more than the maximum number of guide RNAs that can be expressed from said nucleic acid. In some embodiments, the first nucleic acid encodes an endonuclease and from one to three guide RNAs. In some embodiments, the first nucleic acid comprises 1, 2, 3, 4, 5, or 6 guide RNAs, but does not encode an endonuclease.

[0187] In some embodiments, the second nucleic acid, if present, encodes at least one, at least two, at least three, at least four, at least five, or at least six guide RNAs. In some embodiments, the second nucleic acid, if present, encodes from one to n guide RNAs, wherein n is no more than the maximum number of guide RNAs that can be expressed from said nucleic acid In some embodiments, the second nucleic acid, if present, encodes from one to six guide RNAs. In some embodiments, the second nucleic acid, if present, encodes 2-10, 2-9, 2-8, 2-7, 2-6, 2-5, 2-4, or 2-3 guide RNAs. In some embodiments, the second nucleic acid, if present, encodes 2, 3, 4, 5, or 6 guide RNAs. In some embodiments, the second nucleic acid comprises 1, 2, 3, 4, 5, or 6 guide RNAs, but does not encode an endonuclease.

[0188] In some embodiments, the disclosure provides for a composition comprising at least two nucleic acid molecules, wherein the first nucleic acid comprises a guide RNA and the second nucleic acid comprises a guide RNA, wherein the guide RNA encoded by the first nucleic acid and the second nucleic acid are the same. In some embodiments, the disclosure provides for a composition comprising at least two nucleic acid molecules, wherein the first nucleic acid comprises a guide RNA and the second nucleic acid comprises a guide RNA, wherein the guide RNA encoded by the first nucleic acid and the second nucleic acid are different. In some embodiments, the disclosure provides for a composition comprising at least two nucleic acid molecules, wherein the first nucleic acid comprises a guide RNA and the second nucleic acid comprises a guide RNA, wherein at least one guide RNA binds to a target sequence within an exon in the DMD gene that is upstream of a premature stop codon, and wherein at least one guide RNA binds to a target sequence within an exon in the DMD gene that is downstream of a premature stop codon. In some embodiments, the disclosure provides for a composition comprising at least two nucleic acid molecules, wherein the first nucleic acid comprises a guide RNA and the second nucleic acid comprises a guide RNA, wherein the same guide RNA is encoded by the nucleic acid of the first and second nucleic acid molecule. In some embodiments, the disclosure provides for a composition comprising at least two nucleic acid molecules, wherein the first nucleic acid comprises a guide RNA and the second nucleic acid comprises a guide RNA, wherein the second nucleic acid molecule encodes a guide RNA that binds to the same target sequence as the guide RNA in the first nucleic acid molecule. In some embodiments, the disclosure provides for a composition comprising at least two nucleic acid molecules, wherein the second nucleic acid molecule encodes at least 2, at least 3, at least 4, at least 5, or at least 6 guide RNAs, wherein the guide RNAs in the second nucleic acid molecule bind to the same target sequence as the guide RNA in the first nucleic acid molecule.

[0189] In some embodiments, the disclosure provides for a composition comprising at least two guide RNAs, i) each guide RNA targets the same genomic target sequence; ii) each guide RNA targets a different target sequence; or iii) at least one guide RNA targets one sequence and at least one guide RNA targets a different sequence.

[0190] In some embodiments, the disclosure provides for a composition comprising a guide RNA that binds to an exon of the DMD gene, wherein the exon is selected from exon 44, 45, 50, 51, and 53.

[0191] In some embodiments, the disclosure provides for a composition comprising at least two guide RNAs that bind to an exon of the DMD gene, wherein at least one guide RNA binds to a target sequence within an exon in the DMD gene, and wherein at least one guide RNA binds to a different target sequence within the same exon in the DMD gene.

[0192] In some embodiments, the disclosure provides for a composition comprising at least two guide RNAs, wherein at least one guide RNA binds to a target sequence within an exon that is upstream of a premature stop codon, and wherein at least one guide RNA binds to a target sequence within an exon that is downstream of a premature stop codon.

[0193] In some embodiments, the disclosure provides for a composition comprising at least two guide RNAs, wherein at least one guide RNA binds to a target sequence within an exon in the DMD gene, and wherein at least one guide RNA binds to a different target sequence within the same exon in the DMD gene, wherein when expressed in vitro or in vivo in the presence of an appropriate endonuclease (e.g., SaCas9 or SluCas9), a portion of the exon is excised. In some embodiments, the disclosure provides for a composition comprising at least two guide RNAs, wherein once expressed in vitro or in vivo in the presence of an appropriate endonuclease (e.g., SaCas9 or SluCas9), the endonuclease excises a portion of the exon.

[0194] In some embodiments, the disclosure provides for a composition comprising at least two guide RNAs, wherein once expressed in vitro or in vivo in the presence of an appropriate endonuclease (e.g., SaCas9 or SluCas9), the endonuclease excises a portion of the exon, and wherein the portion of the exon remaining after excision are rejoined with a one nucleotide insertion. In some embodiments, the disclosure provides for a composition comprising at least two guide RNAs, wherein once expressed in vitro or in vivo in the presence of an appropriate endonuclease (e.g., SaCas9 or SluCas9), the endonuclease excises a portion of the exon, wherein the portion of the exon remaining after excision is rejoined without a nucleotide insertion.

[0195] In some embodiments, the disclosure provides for a composition comprising at least two guide RNAs, wherein once expressed in vitro or in vivo in the presence of an appropriate endonuclease (e.g., SaCas9 or SluCas9), the endonuclease excises a portion of a dystrophin gene (e.g., an exon). In some embodiments, the portions of the gene remaining after excision are rejoined with a one nucleotide insertion or a two nucleotide insertion. In some embodiments, the portions of the exon remaining after excision are rejoined without any nucleotide insertion. “Precise segmental deletion” or “precise deletion” means that the dual cut process takes out a specific deletion. This precise deletion can lead to exon refraining. In some embodiments, the size of the excised portion is between 5 and 250, 5 and 225, 5 and 200, 5 and 190, 5 and 180, 5 and 170, 5 and 160, 5 and 150, 5 and 125, 5 and 120, 5 and 115, 5 and 110, 5 and 100, 5 and 95, 5 and 90, 5 and 85, 5 and 80, 5 and 75, 5 and 70, 5 and 65, 5 and 60, 5 and 55, 5 and 50, 5 and 45, 5 and 40, 5 and 35, 5 and 30, 5 and 25, 5 and 20, 5 and 15, and 5-10 nucleotides. In some embodiments, the size of excised portion is between 20 and 250, 20 and 225, 20 and 200, 20 and 190, 20 and 180, 20 and 170, 20 and 160, 20 and 150, 20 and 125, 20 and 120, 20 and 115, 20 and 110, 20 and 100, 20 and 95, 20 and 90, 20 and 85, 20 and 80, 20 and 75, 20 and 70, 20 and 65, 20 and 60, 20 and 55, 20 and 50, 20 and 45, 20 and 40, 20 and 35, 20 and 30, and 20 and 25 nucleotides. In some embodiments, the size of excised portion is between 50 and 250, 50 and 225, 50 and 200, 50 and 190, 50 and 180, 50 and 170, 50 and 160, 50 and 150, 50 and 125, 50 and 120, 50 and 115, 50 and 110, and 50 and 100 nucleotides. In some embodiments, the size of excised portion of the exon is between 8 and 167 nucleotides.

[0196] In particular embodiments, if the target is exon 45, 51 or 53 of the dystrophin gene, then the precise deletion facilitates a “3n+1” edit of the dystrophin gene, wherein “n” is any negative whole number (e.g., any negative whole number between −10 and −75). In some embodiments, “n” is −10, −11, −12, −13, −14, −15, −16, −17, −18, −19, −20, −21, −22, −23, −24, −25, −26, −27, −28, −29, −30, −31, −32, −33, −34, −35, −36, −37, −38, −39, −40, −41, −42, −43, −44, −45, −46, −47, −48, −49, −50, −51, −52, −53, −54, −55, −56, −57, −58, −59, −60, −61, −62, −63, −64, −65, −66, −67, −68, −69, −70, −71, −72, −73, −74, −75, −76, −77, −78, −79, or −80. For example, if “n” is −10, a 3n+1 edit would be −30 nucleotides +1 nucleotide, i.e., −29 nucleotides, meaning that the actual excision product would be 29 nucleotides in length. With this in mind, in some embodiments, the actual excision product may be any of the following lengths: 26, 29, 32, 35, 38, 41, 44, 47, 50, 53, 56, 59, 62, 65, 68, 71, 74, 77, 80, 83, 86, 89, 92, 95, 98, 101, 104, 107, 110, 113, 116, 119, 122, 125, 128, 131, 134, 137, 140, 143, 146, 149, 152, 155, 158, 161, 164, 167, 170, 173, 176, 179, 182, 185, 188, 191, 194, 197, 200, 203, 206, 209, 212, 215, or 218 nucleotides in length. In particular embodiments, the excised portion is 92 nucleotides in length. In other embodiments, the excised portion is 188 nucleotides in length. In particular embodiments, the excised portion is 71 nucleotides in length. In other embodiments, the excised portion is 92 nucleotides in length. In other embodiments, the excised portion is 188 nucleotides in length. In other embodiments, the excised portion is 119 nucleotides in length.

[0197] In particular embodiments, if the target is exon 44 or 50 of the dystrophin gene, then the precise deletion facilitates a “3n+2” edit of the dystrophin gene, wherein “n” is any negative whole number (e.g., any negative whole number between −10 and −75). In some embodiments, “n” is −10, −11, −12, −13, −14, −15, −16, −17, −18, −19, −20, −21, −22, −23, −24, −25, −26, −27, −28, −29, −30, −31, −32, −33, −34, −35, −36, −37, −38, −39, −40, −41, −42, −43, −44, −45, −46, −47, −48, −49, −50, −51, −52, −53, −54, −55, −56, −57, −58, −59, −60, −61, −62, −63, −64, −65, −66, −67, −68, −69, −70, −71, −72, −73, −74, −75, −76, −77, −78, −79, or −80. For example, if “n” is −10, a 3n+2 edit would be −30 nucleotides+2 nucleotide, i.e., −28 nucleotides, meaning that the actual excision product would be 28 nucleotides in length. With this in mind, in some embodiments, the actual excision product may be any of the following lengths: 25, 28, 31, 34, 37, 40, 43, 46, 49, 52, 55, 58, 61, 64, 67, 70, 73, 76, 79, 82, 85, 88, 91, 94, 97, 100, 103, 106, 109, 112, 115, 118, 121, 124, 127, 130, 133, 136, 139, 142, 145, 148, 151, 154, 157, 160, 163, 166, 169, 172, 175, 178, 181, 184, 187, 190, 193, 196, 199, 202, 205, 208, 211, 214, or 217 nucleotides in length.

[0198] In some embodiments, the disclosure provides for a composition comprising at least two guide RNAs, wherein once expressed in vitro or in vivo in the presence of an appropriate endonuclease (e.g., SaCas9 or SluCas9), the endonuclease excises a portion of the exon, wherein the size of the excised portion of the exon is between 5, 6, 7, 8, 9, 10, 15, or 20 and 250 nucleotides in length. In some embodiments, the disclosure provides for a composition comprising at least two guide RNAs, wherein once expressed in vitro or in vivo in the presence of an appropriate endonuclease (e.g., SaCas9 or SluCas9), the endonuclease excises a portion of the exon, wherein the size of excised portion of the exon is between 150 and 250, 100 and 250, 5 and 250, 5 and 200, 5 and 150, 5 and 100, 5 and 75, 5 and 50, 5 and 25, 5 and 10, 20 and 250, 20 and 200, 20 and 150, 20 and 100, 20 and 75, 20 and 50, 20 and 25, 50 and 250, 50 and 200, 50 and 150, 50 and 100, and 50 and 75 nucleotides.

[0199] In some embodiments, the disclosure provides for a composition comprising at least two guide RNAs, wherein once expressed in vitro or in vivo in the presence of an appropriate endonuclease (e.g., SaCas9 or SluCas9), the endonuclease excises a portion of the exon, wherein the size of excised portion of the exon is between 8 and 167 nucleotides.

[0200] In some embodiments, a guide RNA and a Cas9 are encoded on a single nucleic acid molecule. In some embodiments, the single nucleic acid molecule comprises a nucleic acid encoding a guide RNA and a nucleic acid encoding a SaCas9 or SluCas9. In some embodiments, two guide RNAs and a Cas9 are encoded on a single nucleic acid molecule. In some embodiments, the single nucleic acid molecule comprises a nucleic acid encoding a first guide RNA, a nucleic acid encoding a second guide RNA, and a nucleic acid encoding a SaCas9 or SluCas9. In some embodiments, the spacer sequences of the first and second guide RNAs are identical. In some embodiments, the spacer sequences of the first and second guide RNAs are not identical.

[0201] In some embodiments, a single nucleic acid molecule comprises a nucleic acid encoding a Cas9 and a nucleic acid encoding two guide RNAs, wherein the nucleic acid molecule encodes no more than two guide RNAs

[0202] In some embodiments, the single nucleic acid molecule is a single vector or comprised in a single vector. In some embodiments, the single vector expresses the two guide RNAs and Cas9. In some embodiments, a pair of guide RNAs and a Cas9 are provided on a single vector. In some embodiments, the single vector comprises a nucleic acid encoding a pair of guide RNAs and a nucleic acid encoding a SaCas9 or SluCas9. In some embodiments, two guide RNAs and a Cas9 are encoded on a single vector. In some embodiments, the single vector comprises a nucleic acid encoding a first guide RNA, a nucleic acid encoding a second guide RNA, and a nucleic acid encoding a SaCas9 or SluCas9. In some embodiments, the spacer sequences of the first and second guide RNAs are identical. In some embodiments, the spacer sequences of the first and second guide RNAs are not identical.

[0203] In some embodiments, the first nucleic acid molecule encodes for a Cas9 molecule and also encodes for one or more copies of a first guide RNA and one or more copies of a second guide RNA. In some embodiments, the first nucleic acid molecule encodes for a Cas9 molecule, but does not encode for any guide RNAs. In some embodiments, the second nucleic acid molecule encodes for one or more copies of a first guide RNA and one or more copies of a second guide RNA, wherein the second nucleic acid molecule does not encode for a Cas9 molecule.

[0204] In some embodiments, the disclosure provides for a composition comprising one or more guide sequences, or comprises any of the nucleic acid molecules disclosed herein encoding for one or more guide sequences. In some embodiments, the guide sequence is SEQ ID NO: 1; In some embodiments, the guide sequence is SEQ ID NO: 2; In some embodiments, the guide sequence is SEQ ID NO: 3; In some embodiments, the guide sequence is SEQ ID NO: 4; In some embodiments, the guide sequence is SEQ ID NO: 5; In some embodiments, the guide sequence is SEQ ID NO: 6; In some embodiments, the guide sequence is SEQ ID NO: 7; In some embodiments, the guide sequence is SEQ ID NO: 8; In some embodiments, the guide sequence is SEQ ID NO: 9; In some embodiments, the guide sequence is SEQ ID NO: 10; In some embodiments, the guide sequence is SEQ ID NO: 11; In some embodiments, the guide sequence is SEQ ID NO: 12; In some embodiments, the guide sequence is SEQ ID NO: 13; In some embodiments, the guide sequence is SEQ ID NO: 14; In some embodiments, the guide sequence is SEQ ID NO: 15; In some embodiments, the guide sequence is SEQ ID NO: 16; In some embodiments, the guide sequence is SEQ ID NO: 17; In some embodiments, the guide sequence is SEQ ID NO: 18; In some embodiments, the guide sequence is SEQ ID NO: 19; In some embodiments, the guide sequence is SEQ ID NO: 20; In some embodiments, the guide sequence is SEQ ID NO: 21; In some embodiments, the guide sequence is SEQ ID NO: 22; In some embodiments, the guide sequence is SEQ ID NO: 23; In some embodiments, the guide sequence is SEQ ID NO: 24; In some embodiments, the guide sequence is SEQ ID NO: 25; In some embodiments, the guide sequence is SEQ ID NO: 26; In some embodiments, the guide sequence is SEQ ID NO: 27; In some embodiments, the guide sequence is SEQ ID NO: 28; In some embodiments, the guide sequence is SEQ ID NO: 29; In some embodiments, the guide sequence is SEQ ID NO: 30; In some embodiments, the guide sequence is SEQ ID NO: 31; In some embodiments, the guide sequence is SEQ ID NO: 32; In some embodiments, the guide sequence is SEQ ID NO: 33; In some embodiments, the guide sequence is SEQ ID NO: 34; In some embodiments, the guide sequence is SEQ ID NO: 35; In some embodiments, the guide sequence is SEQ ID NO: 36; In some embodiments, the guide sequence is SEQ ID NO: 37; In some embodiments, the guide sequence is SEQ ID NO: 38; In some embodiments, the guide sequence is SEQ ID NO: 39; In some embodiments, the guide sequence is SEQ ID NO: 40; In some embodiments, the guide sequence is SEQ ID NO: 41; In some embodiments, the guide sequence is SEQ ID NO: 42; In some embodiments, the guide sequence is SEQ ID NO: 43; In some embodiments, the guide sequence is SEQ ID NO: 44; In some embodiments, the guide sequence is SEQ ID NO: 45; In some embodiments, the guide sequence is SEQ ID NO: 46; In some embodiments, the guide sequence is SEQ ID NO: 47; In some embodiments, the guide sequence is SEQ ID NO: 48; In some embodiments, the guide sequence is SEQ ID NO: 49; In some embodiments, the guide sequence is SEQ ID NO: 50; In some embodiments, the guide sequence is SEQ ID NO: 51; In some embodiments, the guide sequence is SEQ ID NO: 52; In some embodiments, the guide sequence is SEQ ID NO: 53; In some embodiments, the guide sequence is SEQ ID NO: 54; In some embodiments, the guide sequence is SEQ ID NO: 55; In some embodiments, the guide sequence is SEQ ID NO: 56; In some embodiments, the guide sequence is SEQ ID NO: 57; In some embodiments, the guide sequence is SEQ ID NO: 58; In some embodiments, the guide sequence is SEQ ID NO: 59; In some embodiments, the guide sequence is SEQ ID NO: 60; In some embodiments, the guide sequence is SEQ ID NO: 61; In some embodiments, the guide sequence is SEQ ID NO: 62; In some embodiments, the guide sequence is SEQ ID NO: 63; In some embodiments, the guide sequence is SEQ ID NO: 64; In some embodiments, the guide sequence is SEQ ID NO: 65; In some embodiments, the guide sequence is SEQ ID NO: 66; In some embodiments, the guide sequence is SEQ ID NO: 67; In some embodiments, the guide sequence is SEQ ID NO: 68; In some embodiments, the guide sequence is SEQ ID NO: 69; In some embodiments, the guide sequence is SEQ ID NO: 70; In some embodiments, the guide sequence is SEQ ID NO: 71; In some embodiments, the guide sequence is SEQ ID NO: 72; In some embodiments, the guide sequence is SEQ ID NO: 73; In some embodiments, the guide sequence is SEQ ID NO: 74; In some embodiments, the guide sequence is SEQ ID NO: 75; In some embodiments, the guide sequence is SEQ ID NO: 76; In some embodiments, the guide sequence is SEQ ID NO: 77; In some embodiments, the guide sequence is SEQ ID NO: 78; In some embodiments, the guide sequence is SEQ ID NO: 79; In some embodiments, the guide sequence is SEQ ID NO: 80; In some embodiments, the guide sequence is SEQ ID NO: 81; In some embodiments, the guide sequence is SEQ ID NO: 82; In some embodiments, the guide sequence is SEQ ID NO: 83; In some embodiments, the guide sequence is SEQ ID NO: 84; In some embodiments, the guide sequence is SEQ ID NO: 85; In some embodiments, the guide sequence is SEQ ID NO: 86; In some embodiments, the guide sequence is SEQ ID NO: 87; In some embodiments, the guide sequence is SEQ ID NO: 88; In some embodiments, the guide sequence is SEQ ID NO: 89; In some embodiments, the guide sequence is SEQ ID NO: 90; In some embodiments, the guide sequence is SEQ ID NO: 91; In some embodiments, the guide sequence is SEQ ID NO: 92; In some embodiments, the guide sequence is SEQ ID NO: 93; In some embodiments, the guide sequence is SEQ ID NO: 94; In some embodiments, the guide sequence is SEQ ID NO: 95; In some embodiments, the guide sequence is SEQ ID NO: 96; In some embodiments, the guide sequence is SEQ ID NO: 97; In some embodiments, the guide sequence is SEQ ID NO: 98; In some embodiments, the guide sequence is SEQ ID NO: 99; In some embodiments, the guide sequence is SEQ ID NO: 100; In some embodiments, the guide sequence is SEQ ID NO: 101; In some embodiments, the guide sequence is SEQ ID NO: 102; In some embodiments, the guide sequence is SEQ ID NO: 103. In some embodiments, the guide sequence is SEQ ID NO: 104; In some embodiments, the guide sequence is SEQ ID NO: 105; In some embodiments, the guide sequence is SEQ ID NO: 106; In some embodiments, the guide sequence is SEQ ID NO: 107; In some embodiments, the guide sequence is SEQ ID NO: 108; In some embodiments, the guide sequence is SEQ ID NO: 109; In some embodiments, the guide sequence is SEQ ID NO: 110; In some embodiments, the guide sequence is SEQ ID NO: 111; In some embodiments, the guide sequence is SEQ ID NO: 112; In some embodiments, the guide sequence is SEQ ID NO: 113; In some embodiments, the guide sequence is SEQ ID NO: 114; In some embodiments, the guide sequence is SEQ ID NO: 115; In some embodiments, the guide sequence is SEQ ID NO: 116; In some embodiments, the guide sequence is SEQ ID NO: 117; In some embodiments, the guide sequence is SEQ ID NO: 118; In some embodiments, the guide sequence is SEQ ID NO: 119; In some embodiments, the guide sequence is SEQ ID NO: 120; In some embodiments, the guide sequence is SEQ ID NO: 121; In some embodiments, the guide sequence is SEQ ID NO: 122; In some embodiments, the guide sequence is SEQ ID NO: 123; In some embodiments, the guide sequence is SEQ ID NO: 124; In some embodiments, the guide sequence is SEQ ID NO: 125; In some embodiments, the guide sequence is SEQ ID NO: 126; In some embodiments, the guide sequence is SEQ ID NO: 127; In some embodiments, the guide sequence is SEQ ID NO: 128; In some embodiments, the guide sequence is SEQ ID NO: 129; In some embodiments, the guide sequence is SEQ ID NO: 130; In some embodiments, the guide sequence is SEQ ID NO: 131; In some embodiments, the guide sequence is SEQ ID NO: 132; In some embodiments, the guide sequence is SEQ ID NO: 133; In some embodiments, the guide sequence is SEQ ID NO: 134; In some embodiments, the guide sequence is SEQ ID NO: 135; In some embodiments, the guide sequence is SEQ ID NO: 136; In some embodiments, the guide sequence is SEQ ID NO: 137; In some embodiments, the guide sequence is SEQ ID NO: 138; In some embodiments, the guide sequence is SEQ ID NO: 139; In some embodiments, the guide sequence is SEQ ID NO: 140; In some embodiments, the guide sequence is SEQ ID NO: 141; In some embodiments, the guide sequence is SEQ ID NO: 142; In some embodiments, the guide sequence is SEQ ID NO: 143; In some embodiments, the guide sequence is SEQ ID NO: 144; In some embodiments, the guide sequence is SEQ ID NO: 145; In some embodiments, the guide sequence is SEQ ID NO: 146; In some embodiments, the guide sequence is SEQ ID NO: 147; In some embodiments, the guide sequence is SEQ ID NO: 148; In some embodiments, the guide sequence is SEQ ID NO: 149; In some embodiments, the guide sequence is SEQ ID NO: 150; In some embodiments, the guide sequence is SEQ ID NO: 151; In some embodiments, the guide sequence is SEQ ID NO: 152; In some embodiments, the guide sequence is SEQ ID NO: 153; In some embodiments, the guide sequence is SEQ ID NO: 154; In some embodiments, the guide sequence is SEQ ID NO: 155; In some embodiments, the guide sequence is SEQ ID NO: 156; In some embodiments, the guide sequence is SEQ ID NO: 157; In some embodiments, the guide sequence is SEQ ID NO: 158; In some embodiments, the guide sequence is SEQ ID NO: 159; In some embodiments, the guide sequence is SEQ ID NO: 201; In some embodiments, the guide sequence is SEQ ID NO: 202; In some embodiments, the guide sequence is SEQ ID NO: 203; In some embodiments, the guide sequence is SEQ ID NO: 204; In some embodiments, the guide sequence is SEQ ID NO: 205; In some embodiments, the guide sequence is SEQ ID NO: 206; In some embodiments, the guide sequence is SEQ ID NO: 207; In some embodiments, the guide sequence is SEQ ID NO: 208; In some embodiments, the guide sequence is SEQ ID NO: 209; In some embodiments, the guide sequence is SEQ ID NO: 210; In some embodiments, the guide sequence is SEQ ID NO: 211; In some embodiments, the guide sequence is SEQ ID NO: 212; In some embodiments, the guide sequence is SEQ ID NO: 213; In some embodiments, the guide sequence is SEQ ID NO: 214; In some embodiments, the guide sequence is SEQ ID NO: 215; In some embodiments, the guide sequence is SEQ ID NO: 216; In some embodiments, the guide sequence is SEQ ID NO: 217; In some embodiments, the guide sequence is SEQ ID NO: 218; In some embodiments, the guide sequence is SEQ ID NO: 219; In some embodiments, the guide sequence is SEQ ID NO: 220; In some embodiments, the guide sequence is SEQ ID NO: 221; In some embodiments, the guide sequence is SEQ ID NO: 222; In some embodiments, the guide sequence is SEQ ID NO: 223; In some embodiments, the guide sequence is SEQ ID NO: 224; In some embodiments, the guide sequence is SEQ ID NO: 225; In some embodiments, the guide sequence is SEQ ID NO: 226; In some embodiments, the guide sequence is SEQ ID NO: 227; In some embodiments, the guide sequence is SEQ ID NO: 228; In some embodiments, the guide sequence is SEQ ID NO: 229; In some embodiments, the guide sequence is SEQ ID NO: 230; In some embodiments, the guide sequence is SEQ ID NO: 231; In some embodiments, the guide sequence is SEQ ID NO: 232; In some embodiments, the guide sequence is SEQ ID NO: 233; In some embodiments, the guide sequence is SEQ ID NO: 234; In some embodiments, the guide sequence is SEQ ID NO: 235; In some embodiments, the guide sequence is SEQ ID NO: 236; In some embodiments, the guide sequence is SEQ ID NO: 237; In some embodiments, the guide sequence is SEQ ID NO: 238; In some embodiments, the guide sequence is SEQ ID NO: 239; In some embodiments, the guide sequence is SEQ ID NO: 240; In some embodiments, the guide sequence is SEQ ID NO: 241; In some embodiments, the guide sequence is SEQ ID NO: 242; In some embodiments, the guide sequence is SEQ ID NO: 243; In some embodiments, the guide sequence is SEQ ID NO: 244; In some embodiments, the guide sequence is SEQ ID NO: 245; In some embodiments, the guide sequence is SEQ ID NO: 246; In some embodiments, the guide sequence is SEQ ID NO: 247; In some embodiments, the guide sequence is SEQ ID NO: 248; In some embodiments, the guide sequence is SEQ ID NO: 249; In some embodiments, the guide sequence is SEQ ID NO: 250; In some embodiments, the guide sequence is SEQ ID NO: 251; In some embodiments, the guide sequence is SEQ ID NO: 252; In some embodiments, the guide sequence is SEQ ID NO: 253; In some embodiments, the guide sequence is SEQ ID NO: 254; In some embodiments, the guide sequence is SEQ ID NO: 255; In some embodiments, the guide sequence is SEQ ID NO: 256; In some embodiments, the guide sequence is SEQ ID NO: 257; In some embodiments, the guide sequence is SEQ ID NO: 258; In some embodiments, the guide sequence is SEQ ID NO: 259; In some embodiments, the guide sequence is SEQ ID NO: 260; In some embodiments, the guide sequence is SEQ ID NO: 261; In some embodiments, the guide sequence is SEQ ID NO: 262; In some embodiments, the guide sequence is SEQ ID NO: 263; In some embodiments, the guide sequence is SEQ ID NO: 264; In some embodiments, the guide sequence is SEQ ID NO: 265; In some embodiments, the guide sequence is SEQ ID NO: 266; In some embodiments, the guide sequence is SEQ ID NO: 267; In some embodiments, the guide sequence is SEQ ID NO: 268; In some embodiments, the guide sequence is SEQ ID NO: 269; In some embodiments, the guide sequence is SEQ ID NO: 270; In some embodiments, the guide sequence is SEQ ID NO: 271; In some embodiments, the guide sequence is SEQ ID NO: 272; In some embodiments, the guide sequence is SEQ ID NO: 273; In some embodiments, the guide sequence is SEQ ID NO: 274; In some embodiments, the guide sequence is SEQ ID NO: 275; In some embodiments, the guide sequence is SEQ ID NO: 276; In some embodiments, the guide sequence is SEQ ID NO: 277; In some embodiments, the guide sequence is SEQ ID NO: 278; In some embodiments, the guide sequence is SEQ ID NO: 279; In some embodiments, the guide sequence is SEQ ID NO: 280; In some embodiments, the guide sequence is SEQ ID NO: 281; In some embodiments, the guide sequence is SEQ ID NO: 282; In some embodiments, the guide sequence is SEQ ID NO: 283; In some embodiments, the guide sequence is SEQ ID NO: 284; In some embodiments, the guide sequence is SEQ ID NO: 285; In some embodiments, the guide sequence is SEQ ID NO: 286; In some embodiments, the guide sequence is SEQ ID NO: 287; In some embodiments, the guide sequence is SEQ ID NO: 288; In some embodiments, the guide sequence is SEQ ID NO: 289; In some embodiments, the guide sequence is SEQ ID NO: 290; In some embodiments, the guide sequence is SEQ ID NO: 291; In some embodiments, the guide sequence is SEQ ID NO: 292; In some embodiments, the guide sequence is SEQ ID NO: 924; In some embodiments, the guide sequence is SEQ ID NO: 925; In some embodiments, the guide sequence is SEQ ID NO: 926; In some embodiments, the guide sequence is SEQ ID NO: 927; In some embodiments, the guide sequence is SEQ ID NO: 928; In some embodiments, the guide sequence is SEQ ID NO: 929; In some embodiments, the guide sequence is SEQ ID NO: 930; In some embodiments, the guide sequence is SEQ ID NO: 931; In some embodiments, the guide sequence is SEQ ID NO: 932; In some embodiments, the guide sequence is SEQ ID NO: 933; In some embodiments, the guide sequence is SEQ ID NO: 934; In some embodiments, the guide sequence is SEQ ID NO: 935; In some embodiments, the guide sequence is SEQ ID NO: 936; In some embodiments, the guide sequence is SEQ ID NO: 937; In some embodiments, the guide sequence is SEQ ID NO: 938.

[0205] In some embodiments, a composition is provided comprising: a) one or more nucleic acid molecules encoding a SaCas9 or SluCas9 and b) a pair of guide sequences comprising a first guide sequence and a second guide sequence, wherein the pair is selected from any of the following pairs: SEQ ID NO: 1 and SEQ ID NO: 3; SEQ ID NO: 3 and SEQ ID NO: 4; SEQ ID NO: 3 and SEQ ID NO: 5; SEQ ID NO: 3 and SEQ ID NO: 6; SEQ ID NO: 3 and SEQ ID NO: 7; SEQ ID NO: 3 and SEQ ID NO: 8; SEQ ID NO: 3 and SEQ ID NO: 9; SEQ ID NO: 4 and SEQ ID NO: 5; SEQ ID NO: 4 and SEQ ID NO: 6; SEQ ID NO: 4 and SEQ ID NO: 7; SEQ ID NO: 4 and SEQ ID NO: 8; SEQ ID NO: 4 and SEQ ID NO: 9; SEQ ID NO: 5 and SEQ ID NO: 6; SEQ ID NO: 5 and SEQ ID NO: 7; SEQ ID NO: 5 and SEQ ID NO: 8; SEQ ID NO: 5 and SEQ ID NO: 9; SEQ ID NO: 6 and SEQ ID NO: 7; SEQ ID NO: 6 and SEQ ID NO: 8; SEQ ID NO: 6 and SEQ ID NO: 9; SEQ ID NO: 7 and SEQ ID NO: 8; SEQ ID NO: 7 and SEQ ID NO: 9; SEQ ID NO: 8 and SEQ ID NO: 9; SEQ ID NO: 11 and SEQ ID NO: 12; SEQ ID NO: 11 and SEQ ID NO: 13; SEQ ID NO: 11 and SEQ ID NO: 14; SEQ ID NO: 11 and SEQ ID NO: 15; SEQ ID NO: 12 and SEQ ID NO: 13; SEQ ID NO: 12 and SEQ ID NO: 14; SEQ ID NO: 12 and SEQ ID NO: 15; SEQ ID NO: 13 and SEQ ID NO: 14; SEQ ID NO: 13 and SEQ ID NO: 15; SEQ ID NO: 14 and SEQ ID NO: 15; SEQ ID NO: 16 and SEQ ID NO: 17; SEQ ID NO: 16 and SEQ ID NO: 18; SEQ ID NO: 16 and SEQ ID NO: 19; SEQ ID NO: 16 and SEQ ID NO: 20; SEQ ID NO: 16 and SEQ ID NO: 21; SEQ ID NO: 16 and SEQ ID NO: 22; SEQ ID NO: 16 and SEQ ID NO: 23; SEQ ID NO: 16 and SEQ ID NO: 24; SEQ ID NO: 16 and SEQ ID NO: 25; SEQ ID NO: 16 and SEQ ID NO: 26; SEQ ID NO: 17 and SEQ ID NO: 18; SEQ ID NO: 17 and SEQ ID NO: 19; SEQ ID NO: 17 and SEQ ID NO: 20; SEQ ID NO: 17 and SEQ ID NO: 21; SEQ ID NO: 17 and SEQ ID NO: 22; SEQ ID NO: 17 and SEQ ID NO: 23; SEQ ID NO: 17 and SEQ ID NO: 24; SEQ ID NO: 17 and SEQ ID NO: 25; SEQ ID NO: 17 and SEQ ID NO: 26; SEQ ID NO: 18 and SEQ ID NO: 19; SEQ ID NO: 18 and SEQ ID NO: 20; SEQ ID NO: 18 and SEQ ID NO: 21; SEQ ID NO: 18 and SEQ ID NO: 22; SEQ ID NO: 18 and SEQ ID NO: 23; SEQ ID NO: 18 and SEQ ID NO: 24; SEQ ID NO: 18 and SEQ ID NO: 25; SEQ ID NO: 18 and SEQ ID NO: 26; SEQ ID NO: 19 and SEQ ID NO: 20; SEQ ID NO: 19 and SEQ ID NO: 21; SEQ ID NO: 19 and SEQ ID NO: 22; SEQ ID NO: 19 and SEQ ID NO: 23; SEQ ID NO: 19 and SEQ ID NO: 24; SEQ ID NO: 19 and SEQ ID NO: 25; SEQ ID NO: 19 and SEQ ID NO: 26; SEQ ID NO: 20 and SEQ ID NO: 21; SEQ ID NO: 20 and SEQ ID NO: 22; SEQ ID NO: 20 and SEQ ID NO: 23; SEQ ID NO: 20 and SEQ ID NO: 24; SEQ ID NO: 20 and SEQ ID NO: 25; SEQ ID NO: 20 and SEQ ID NO: 26; SEQ ID NO: 21 and SEQ ID NO: 22; SEQ ID NO: 21 and SEQ ID NO: 23; SEQ ID NO: 21 and SEQ ID NO: 24; SEQ ID NO: 21 and SEQ ID NO: 25; SEQ ID NO: 21 and SEQ ID NO: 26; SEQ ID NO: 22 and SEQ ID NO: 23; SEQ ID NO: 22 and SEQ ID NO: 24; SEQ ID NO: 22 and SEQ ID NO: 25; SEQ ID NO: 22 and SEQ ID NO: 26; SEQ ID NO: 23 and SEQ ID NO: 24; SEQ ID NO: 23 and SEQ ID NO: 25; SEQ ID NO: 23 and SEQ ID NO: 26; SEQ ID NO: 24 and SEQ ID NO: 25; SEQ ID NO: 24 and SEQ ID NO: 26; SEQ ID NO: 25 and SEQ ID NO: 26; SEQ ID NO: 110 and SEQ ID NO: 120; SEQ ID NO: 110 and SEQ ID NO: 121; SEQ ID NO: 110 and SEQ ID NO: 122; SEQ ID NO: 110 and SEQ ID NO: 123; SEQ ID NO: 110 and SEQ ID NO: 124; SEQ ID NO: 110 and SEQ ID NO: 125; SEQ ID NO: 111 and SEQ ID NO: 112; SEQ ID NO: 111 and SEQ ID NO: 113; SEQ ID NO: 111 and SEQ ID NO: 114; SEQ ID NO: 111 and SEQ ID NO: 115; SEQ ID NO: 111 and SEQ ID NO: 116; SEQ ID NO: 111 and SEQ ID NO: 117; SEQ ID NO: 111 and SEQ ID NO: 118; SEQ ID NO: 111 and SEQ ID NO: 119; SEQ ID NO: 111 and SEQ ID NO: 120; SEQ ID NO: 111 and SEQ ID NO: 121; SEQ ID NO: 111 and SEQ ID NO: 122; SEQ ID NO: 111 and SEQ ID NO: 123; SEQ ID NO: 111 and SEQ ID NO: 124; SEQ ID NO: 111 and SEQ ID NO: 125; SEQ ID NO: 112 and SEQ ID NO: 113; SEQ ID NO: 112 and SEQ ID NO: 114; SEQ ID NO: 112 and SEQ ID NO: 115; SEQ ID NO: 112 and SEQ ID NO: 116; SEQ ID NO: 112 and SEQ ID NO: 117; SEQ ID NO: 112 and SEQ ID NO: 118; SEQ ID NO: 112 and SEQ ID NO: 119; SEQ ID NO: 112 and SEQ ID NO: 120; SEQ ID NO: 112 and SEQ ID NO: 121; SEQ ID NO: 112 and SEQ ID NO: 122; SEQ ID NO: 112 and SEQ ID NO: 123; SEQ ID NO: 112 and SEQ ID NO: 124; SEQ ID NO: 112 and SEQ ID NO: 125; SEQ ID NO: 113 and SEQ ID NO: 114; SEQ ID NO: 113 and SEQ ID NO: 115; SEQ ID NO: 113 and SEQ ID NO: 116; SEQ ID NO: 113 and SEQ ID NO: 117; SEQ ID NO: 113 and SEQ ID NO: 118; SEQ ID NO: 113 and SEQ ID NO: 119; SEQ ID NO: 113 and SEQ ID NO: 120; SEQ ID NO: 113 and SEQ ID NO: 121; SEQ ID NO: 113 and SEQ ID NO: 122; SEQ ID NO: 113 and SEQ ID NO: 123; SEQ ID NO: 113 and SEQ ID NO: 124; SEQ ID NO: 113 and SEQ ID NO: 125; SEQ ID NO: 114 and SEQ ID NO: 115; SEQ ID NO: 114 and SEQ ID NO: 116; SEQ ID NO: 114 and SEQ ID NO: 117; SEQ ID NO: 114 and SEQ ID NO: 118; SEQ ID NO: 114 and SEQ ID NO: 119; SEQ ID NO: 114 and SEQ ID NO: 120; SEQ ID NO: 114 and SEQ ID NO: 121; SEQ ID NO: 114 and SEQ ID NO: 122; SEQ ID NO: 114 and SEQ ID NO: 123; SEQ ID NO: 114 and SEQ ID NO: 124; SEQ ID NO: 114 and SEQ ID NO: 125; SEQ ID NO: 115 and SEQ ID NO: 116; SEQ ID NO: 115 and SEQ ID NO: 117; SEQ ID NO: 115 and SEQ ID NO: 118; SEQ ID NO: 115 and SEQ ID NO: 119; SEQ ID NO: 115 and SEQ ID NO: 120; SEQ ID NO: 115 and SEQ ID NO: 121; SEQ ID NO: 115 and SEQ ID NO: 122; SEQ ID NO: 115 and SEQ ID NO: 123; SEQ ID NO: 115 and SEQ ID NO: 124; SEQ ID NO: 115 and SEQ ID NO: 125; SEQ ID NO: 116 and SEQ ID NO: 117; SEQ ID NO: 116 and SEQ ID NO: 118; SEQ ID NO: 116 and SEQ ID NO: 119; SEQ ID NO: 116 and SEQ ID NO: 120; SEQ ID NO: 116 and SEQ ID NO: 121; SEQ ID NO: 116 and SEQ ID NO: 122; SEQ ID NO: 116 and SEQ ID NO: 123; SEQ ID NO: 116 and SEQ ID NO: 124; SEQ ID NO: 116 and SEQ ID NO: 125; SEQ ID NO: 117 and SEQ ID NO: 118; SEQ ID NO: 117 and SEQ ID NO: 119; SEQ ID NO: 117 and SEQ ID NO: 120; SEQ ID NO: 117 and SEQ ID NO: 121; SEQ ID NO: 117 and SEQ ID NO: 122; SEQ ID NO: 117 and SEQ ID NO: 123; SEQ ID NO: 117 and SEQ ID NO: 124; SEQ ID NO: 117 and SEQ ID NO: 125; SEQ ID NO: 118 and SEQ ID NO: 119; SEQ ID NO: 118 and SEQ ID NO: 120; SEQ ID NO: 118 and SEQ ID NO: 121; SEQ ID NO: 118 and SEQ ID NO: 122; SEQ ID NO: 118 and SEQ ID NO: 123; SEQ ID NO: 118 and SEQ ID NO: 124; SEQ ID NO: 118 and SEQ ID NO: 125; SEQ ID NO: 119 and SEQ ID NO: 120; SEQ ID NO: 119 and SEQ ID NO: 121; SEQ ID NO: 119 and SEQ ID NO: 122; SEQ ID NO: 119 and SEQ ID NO: 123; SEQ ID NO: 119 and SEQ ID NO: 124; SEQ ID NO: 119 and SEQ ID NO: 125; SEQ ID NO: 120 and SEQ ID NO: 121; SEQ ID NO: 120 and SEQ ID NO: 122; SEQ ID NO: 120 and SEQ ID NO: 123; SEQ ID NO: 120 and SEQ ID NO: 124; SEQ ID NO: 120 and SEQ ID NO: 125; SEQ ID NO: 121 and SEQ ID NO: 122; SEQ ID NO: 121 and SEQ ID NO: 123; SEQ ID NO: 121 and SEQ ID NO: 124; SEQ ID NO: 121 and SEQ ID NO: 125; SEQ ID NO: 122 and SEQ ID NO: 123; SEQ ID NO: 122 and SEQ ID NO: 124; SEQ ID NO: 122 and SEQ ID NO: 125; SEQ ID NO: 123 and SEQ ID NO: 124; SEQ ID NO: 123 and SEQ ID NO: 125; SEQ ID NO: 124 and SEQ ID NO: 125; SEQ ID NO: 126 and SEQ ID NO: 127; SEQ ID NO: 126 and SEQ ID NO: 128; SEQ ID NO: 126 and SEQ ID NO: 129; SEQ ID NO: 126 and SEQ ID NO: 130; SEQ ID NO: 126 and SEQ ID NO: 131; SEQ ID NO: 126 and SEQ ID NO: 132; SEQ ID NO: 126 and SEQ ID NO: 133; SEQ ID NO: 126 and SEQ ID NO: 134; SEQ ID NO: 126 and SEQ ID NO: 135; SEQ ID NO: 126 and SEQ ID NO: 136; SEQ ID NO: 126 and SEQ ID NO: 137; SEQ ID NO: 126 and SEQ ID NO: 138; SEQ ID NO: 126 and SEQ ID NO: 139; SEQ ID NO: 126 and SEQ ID NO: 140; SEQ ID NO: 126 and SEQ ID NO: 141; SEQ ID NO: 126 and SEQ ID NO: 142; SEQ ID NO: 126 and SEQ ID NO: 143; SEQ ID NO: 126 and SEQ ID NO: 144; SEQ ID NO: 126 and SEQ ID NO: 145; SEQ ID NO: 126 and SEQ ID NO: 146; SEQ ID NO: 126 and SEQ ID NO: 147; SEQ ID NO: 127 and SEQ ID NO: 128; SEQ ID NO: 127 and SEQ ID NO: 129; SEQ ID NO: 127 and SEQ ID NO: 130; SEQ ID NO: 127 and SEQ ID NO: 131; SEQ ID NO: 127 and SEQ ID NO: 132; SEQ ID NO: 127 and SEQ ID NO: 133; SEQ ID NO: 127 and SEQ ID NO: 134; SEQ ID NO: 127 and SEQ ID NO: 135; SEQ ID NO: 127 and SEQ ID NO: 136; SEQ ID NO: 127 and SEQ ID NO: 137; SEQ ID NO: 127 and SEQ ID NO: 138; SEQ ID NO: 127 and SEQ ID NO: 139; SEQ ID NO: 127 and SEQ ID NO: 140; SEQ ID NO: 127 and SEQ ID NO: 141; SEQ ID NO: 127 and SEQ ID NO: 142; SEQ ID NO: 127 and SEQ ID NO: 143; SEQ ID NO: 127 and SEQ ID NO: 144; SEQ ID NO: 127 and SEQ ID NO: 145; SEQ ID NO: 127 and SEQ ID NO: 146; SEQ ID NO: 127 and SEQ ID NO: 147; SEQ ID NO: 128 and SEQ ID NO: 129; SEQ ID NO: 128 and SEQ ID NO: 130; SEQ ID NO: 128 and SEQ ID NO: 131; SEQ ID NO: 128 and SEQ ID NO: 132; SEQ ID NO: 128 and SEQ ID NO: 133; SEQ ID NO: 128 and SEQ ID NO: 134; SEQ ID NO: 128 and SEQ ID NO: 135; SEQ ID NO: 128 and SEQ ID NO: 136; SEQ ID NO: 128 and SEQ ID NO: 137; SEQ ID NO: 128 and SEQ ID NO: 138; SEQ ID NO: 128 and SEQ ID NO: 139; SEQ ID NO: 128 and SEQ ID NO: 140; SEQ ID NO: 128 and SEQ ID NO: 141; SEQ ID NO: 128 and SEQ ID NO: 142; SEQ ID NO: 128 and SEQ ID NO: 143; SEQ ID NO: 128 and SEQ ID NO: 144; SEQ ID NO: 128 and SEQ ID NO: 145; SEQ ID NO: 128 and SEQ ID NO: 146; SEQ ID NO: 128 and SEQ ID NO: 147; SEQ ID NO: 129 and SEQ ID NO: 130; SEQ ID NO: 129 and SEQ ID NO: 131; SEQ ID NO: 129 and SEQ ID NO: 132; SEQ ID NO: 129 and SEQ ID NO: 133; SEQ ID NO: 129 and SEQ ID NO: 134; SEQ ID NO: 129 and SEQ ID NO: 135; SEQ ID NO: 129 and SEQ ID NO: 136; SEQ ID NO: 129 and SEQ ID NO: 137; SEQ ID NO: 129 and SEQ ID NO: 138; SEQ ID NO: 129 and SEQ ID NO: 139; SEQ ID NO: 129 and SEQ ID NO: 140; SEQ ID NO: 129 and SEQ ID NO: 141; SEQ ID NO: 129 and SEQ ID NO: 142; SEQ ID NO: 129 and SEQ ID NO: 143; SEQ ID NO: 129 and SEQ ID NO: 144; SEQ ID NO: 129 and SEQ ID NO: 145; SEQ ID NO: 129 and SEQ ID NO: 146; SEQ ID NO: 129 and SEQ ID NO: 147; SEQ ID NO: 130 and SEQ ID NO: 131; SEQ ID NO: 130 and SEQ ID NO: 132; SEQ ID NO: 130 and SEQ ID NO: 133; SEQ ID NO: 130 and SEQ ID NO: 134; SEQ ID NO: 130 and SEQ ID NO: 135; SEQ ID NO: 130 and SEQ ID NO: 136; SEQ ID NO: 130 and SEQ ID NO: 137; SEQ ID NO: 130 and SEQ ID NO: 138; SEQ ID NO: 130 and SEQ ID NO: 139; SEQ ID NO: 130 and SEQ ID NO: 140; SEQ ID NO: 130 and SEQ ID NO: 141; SEQ ID NO: 130 and SEQ ID NO: 142; SEQ ID NO: 130 and SEQ ID NO: 143; SEQ ID NO: 130 and SEQ ID NO: 144; SEQ ID NO: 130 and SEQ ID NO: 145; SEQ ID NO: 130 and SEQ ID NO: 146; SEQ ID NO: 130 and SEQ ID NO: 147; SEQ ID NO: 131 and SEQ ID NO: 132; SEQ ID NO: 131 and SEQ ID NO: 133; SEQ ID NO: 131 and SEQ ID NO: 134; SEQ ID NO: 131 and SEQ ID NO: 135; SEQ ID NO: 131 and SEQ ID NO: 136; SEQ ID NO: 131 and SEQ ID NO: 137; SEQ ID NO: 131 and SEQ ID NO: 138; SEQ ID NO: 131 and SEQ ID NO: 139; SEQ ID NO: 131 and SEQ ID NO: 140; SEQ ID NO: 131 and SEQ ID NO: 141; SEQ ID NO: 131 and SEQ ID NO: 142; SEQ ID NO: 131 and SEQ ID NO: 143; SEQ ID NO: 131 and SEQ ID NO: 144; SEQ ID NO: 131 and SEQ ID NO: 145; SEQ ID NO: 131 and SEQ ID NO: 146; SEQ ID NO: 131 and SEQ ID NO: 147; SEQ ID NO: 132 and SEQ ID NO: 133; SEQ ID NO: 132 and SEQ ID NO: 134; SEQ ID NO: 132 and SEQ ID NO: 135; SEQ ID NO: 132 and SEQ ID NO: 136; SEQ ID NO: 132 and SEQ ID NO: 137; SEQ ID NO: 132 and SEQ ID NO: 138; SEQ ID NO: 132 and SEQ ID NO: 139; SEQ ID NO: 132 and SEQ ID NO: 140; SEQ ID NO: 132 and SEQ ID NO: 141; SEQ ID NO: 132 and SEQ ID NO: 142; SEQ ID NO: 132 and SEQ ID NO: 143; SEQ ID NO: 132 and SEQ ID NO: 144; SEQ ID NO: 132 and SEQ ID NO: 145; SEQ ID NO: 132 and SEQ ID NO: 146; SEQ ID NO: 132 and SEQ ID NO: 147; SEQ ID NO: 133 and SEQ ID NO: 134; SEQ ID NO: 133 and SEQ ID NO: 135; SEQ ID NO: 133 and SEQ ID NO: 136; SEQ ID NO: 133 and SEQ ID NO: 137; SEQ ID NO: 133 and SEQ ID NO: 138; SEQ ID NO: 133 and SEQ ID NO: 139; SEQ ID NO: 133 and SEQ ID NO: 140; SEQ ID NO: 133 and SEQ ID NO: 141; SEQ ID NO: 133 and SEQ ID NO: 142; SEQ ID NO: 133 and SEQ ID NO: 143; SEQ ID NO: 133 and SEQ ID NO: 144; SEQ ID NO: 133 and SEQ ID NO: 145; SEQ ID NO: 133 and SEQ ID NO: 146; SEQ ID NO: 133 and SEQ ID NO: 147; SEQ ID NO: 134 and SEQ ID NO: 135; SEQ ID NO: 134 and SEQ ID NO: 136; SEQ ID NO: 134 and SEQ ID NO: 137; SEQ ID NO: 134 and SEQ ID NO: 138; SEQ ID NO: 134 and SEQ ID NO: 139; SEQ ID NO: 134 and SEQ ID NO: 140; SEQ ID NO: 134 and SEQ ID NO: 141; SEQ ID NO: 134 and SEQ ID NO: 142; SEQ ID NO: 134 and SEQ ID NO: 143; SEQ ID NO: 134 and SEQ ID NO: 144; SEQ ID NO: 134 and SEQ ID NO: 145; SEQ ID NO: 134 and SEQ ID NO: 146; SEQ ID NO: 134 and SEQ ID NO: 147; SEQ ID NO: 135 and SEQ ID NO: 136; SEQ ID NO: 135 and SEQ ID NO: 137; SEQ ID NO: 135 and SEQ ID NO: 138; SEQ ID NO: 135 and SEQ ID NO: 139; SEQ ID NO: 135 and SEQ ID NO: 140; SEQ ID NO: 135 and SEQ ID NO: 141; SEQ ID NO: 135 and SEQ ID NO: 142; SEQ ID NO: 135 and SEQ ID NO: 143; SEQ ID NO: 135 and SEQ ID NO: 144; SEQ ID NO: 135 and SEQ ID NO: 145; SEQ ID NO: 135 and SEQ ID NO: 146; SEQ ID NO: 135 and SEQ ID NO: 147; SEQ ID NO: 136 and SEQ ID NO: 137; SEQ ID NO: 136 and SEQ ID NO: 138; SEQ ID NO: 136 and SEQ ID NO: 139; SEQ ID NO: 136 and SEQ ID NO: 140; SEQ ID NO: 136 and SEQ ID NO: 141; SEQ ID NO: 136 and SEQ ID NO: 142; SEQ ID NO: 136 and SEQ ID NO: 143; SEQ ID NO: 136 and SEQ ID NO: 144; SEQ ID NO: 136 and SEQ ID NO: 145; SEQ ID NO: 136 and SEQ ID NO: 146; SEQ ID NO: 136 and SEQ ID NO: 147; SEQ ID NO: 137 and SEQ ID NO: 138; SEQ ID NO: 137 and SEQ ID NO: 139; SEQ ID NO: 137 and SEQ ID NO: 140; SEQ ID NO: 137 and SEQ ID NO: 141; SEQ ID NO: 137 and SEQ ID NO: 142; SEQ ID NO: 137 and SEQ ID NO: 143; SEQ ID NO: 137 and SEQ ID NO: 144; SEQ ID NO: 137 and SEQ ID NO: 145; SEQ ID NO: 137 and SEQ ID NO: 146; SEQ ID NO: 137 and SEQ ID NO: 147; SEQ ID NO: 138 and SEQ ID NO: 139; SEQ ID NO: 138 and SEQ ID NO: 140; SEQ ID NO: 138 and SEQ ID NO: 141; SEQ ID NO: 138 and SEQ ID NO: 142; SEQ ID NO: 138 and SEQ ID NO: 143; SEQ ID NO: 138 and SEQ ID NO: 144; SEQ ID NO: 138 and SEQ ID NO: 145; SEQ ID NO: 138 and SEQ ID NO: 146; SEQ ID NO: 138 and SEQ ID NO: 147; SEQ ID NO: 139 and SEQ ID NO: 140; SEQ ID NO: 139 and SEQ ID NO: 141; SEQ ID NO: 139 and SEQ ID NO: 142; SEQ ID NO: 139 and SEQ ID NO: 143; SEQ ID NO: 139 and SEQ ID NO: 144; SEQ ID NO: 139 and SEQ ID NO: 145; SEQ ID NO: 139 and SEQ ID NO: 146; SEQ ID NO: 139 and SEQ ID NO: 147; SEQ ID NO: 140 and SEQ ID NO: 141; SEQ ID NO: 140 and SEQ ID NO: 142; SEQ ID NO: 140 and SEQ ID NO: 143; SEQ ID NO: 140 and SEQ ID NO: 144; SEQ ID NO: 140 and SEQ ID NO: 145; SEQ ID NO: 140 and SEQ ID NO: 146; SEQ ID NO: 140 and SEQ ID NO: 147; SEQ ID NO: 141 and SEQ ID NO: 142; SEQ ID NO: 141 and SEQ ID NO: 143; SEQ ID NO: 141 and SEQ ID NO: 144; SEQ ID NO: 141 and SEQ ID NO: 145; SEQ ID NO: 141 and SEQ ID NO: 146; SEQ ID NO: 141 and SEQ ID NO: 147; SEQ ID NO: 142 and SEQ ID NO: 143; SEQ ID NO: 142 and SEQ ID NO: 144; SEQ ID NO: 142 and SEQ ID NO: 145; SEQ ID NO: 142 and SEQ ID NO: 146; SEQ ID NO: 142 and SEQ ID NO: 147; SEQ ID NO: 143 and SEQ ID NO: 144; SEQ ID NO: 143 and SEQ ID NO: 145; SEQ ID NO: 143 and SEQ ID NO: 146; SEQ ID NO: 143 and SEQ ID NO: 147; SEQ ID NO: 144 and SEQ ID NO: 145; SEQ ID NO: 144 and SEQ ID NO: 146; SEQ ID NO: 144 and SEQ ID NO: 147; SEQ ID NO: 145 and SEQ ID NO: 146; SEQ ID NO: 145 and SEQ ID NO: 147; SEQ ID NO: 146 and SEQ ID NO: 147; SEQ ID NO: 148 and SEQ ID NO: 149; SEQ ID NO: 148 and SEQ ID NO: 150; SEQ ID NO: 148 and SEQ ID NO: 151; SEQ ID NO: 148 and SEQ ID NO: 152; SEQ ID NO: 148 and SEQ ID NO: 153; SEQ ID NO: 148 and SEQ ID NO: 154; SEQ ID NO: 148 and SEQ ID NO: 155; SEQ ID NO: 148 and SEQ ID NO: 156; SEQ ID NO: 148 and SEQ ID NO: 157; SEQ ID NO: 148 and SEQ ID NO: 158; SEQ ID NO: 148 and SEQ ID NO: 159; SEQ ID NO: 149 and SEQ ID NO: 150; SEQ ID NO: 149 and SEQ ID NO: 151; SEQ ID NO: 149 and SEQ ID NO: 152; SEQ ID NO: 149 and SEQ ID NO: 153; SEQ ID NO: 149 and SEQ ID NO: 154; SEQ ID NO: 149 and SEQ ID NO: 155; SEQ ID NO: 149 and SEQ ID NO: 156; SEQ ID NO: 149 and SEQ ID NO: 157; SEQ ID NO: 149 and SEQ ID NO: 158; SEQ ID NO: 149 and SEQ ID NO: 159; SEQ ID NO: 150 and SEQ ID NO: 151; SEQ ID NO: 150 and SEQ ID NO: 152; SEQ ID NO: 150 and SEQ ID NO: 153; SEQ ID NO: 150 and SEQ ID NO: 154; SEQ ID NO: 150 and SEQ ID NO: 155; SEQ ID NO: 150 and SEQ ID NO: 156; SEQ ID NO: 150 and SEQ ID NO: 157; SEQ ID NO: 150 and SEQ ID NO: 158; SEQ ID NO: 150 and SEQ ID NO: 159; SEQ ID NO: 151 and SEQ ID NO: 152; SEQ ID NO: 151 and SEQ ID NO: 153; SEQ ID NO: 151 and SEQ ID NO: 154; SEQ ID NO: 151 and SEQ ID NO: 155; SEQ ID NO: 151 and SEQ ID NO: 156; SEQ ID NO: 151 and SEQ ID NO: 157; SEQ ID NO: 151 and SEQ ID NO: 158; SEQ ID NO: 151 and SEQ ID NO: 159; SEQ ID NO: 152 and SEQ ID NO: 153; SEQ ID NO: 152 and SEQ ID NO: 154; SEQ ID NO: 152 and SEQ ID NO: 155; SEQ ID NO: 152 and SEQ ID NO: 156; SEQ ID NO: 152 and SEQ ID NO: 157; SEQ ID NO: 152 and SEQ ID NO: 158; SEQ ID NO: 152 and SEQ ID NO: 159; SEQ ID NO: 153 and SEQ ID NO: 154; SEQ ID NO: 153 and SEQ ID NO: 155; SEQ ID NO: 153 and SEQ ID NO: 156; SEQ ID NO: 153 and SEQ ID NO: 157; SEQ ID NO: 153 and SEQ ID NO: 158; SEQ ID NO: 153 and SEQ ID NO: 159; SEQ ID NO: 154 and SEQ ID NO: 155; SEQ ID NO: 154 and SEQ ID NO: 156; SEQ ID NO: 154 and SEQ ID NO: 157; SEQ ID NO: 154 and SEQ ID NO: 158; SEQ ID NO: 154 and SEQ ID NO: 159; SEQ ID NO: 155 and SEQ ID NO: 156; SEQ ID NO: 155 and SEQ ID NO: 157; SEQ ID NO: 155 and SEQ ID NO: 158; SEQ ID NO: 155 and SEQ ID NO: 159; SEQ ID NO: 156 and SEQ ID NO: 157; SEQ ID NO: 156 and SEQ ID NO: 158; SEQ ID NO: 156 and SEQ ID NO: 159; SEQ ID NO: 157 and SEQ ID NO: 158; SEQ ID NO: 157 and SEQ ID NO: 159; SEQ ID NO: 158 and SEQ ID NO: 159; SEQ ID NO: 27 and SEQ ID NO: 28; SEQ ID NO: 27 and SEQ ID NO: 29; SEQ ID NO: 27 and SEQ ID NO: 30; SEQ ID NO: 27 and SEQ ID NO: 31; SEQ ID NO: 27 and SEQ ID NO: 32; SEQ ID NO: 27 and SEQ ID NO: 33; SEQ ID NO: 27 and SEQ ID NO: 34; SEQ ID NO: 27 and SEQ ID NO: 35; SEQ ID NO: 27 and SEQ ID NO: 36; SEQ ID NO: 27 and SEQ ID NO: 37; SEQ ID NO: 27 and SEQ ID NO: 38; SEQ ID NO: 27 and SEQ ID NO: 39; SEQ ID NO: 27 and SEQ ID NO: 40; SEQ ID NO: 27 and SEQ ID NO: 41; SEQ ID NO: 27 and SEQ ID NO: 42; SEQ ID NO: 27 and SEQ ID NO: 43; SEQ ID NO: 27 and SEQ ID NO: 44; SEQ ID NO: 27 and SEQ ID NO: 45; SEQ ID NO: 27 and SEQ ID NO: 46; SEQ ID NO: 27 and SEQ ID NO: 47; SEQ ID NO: 27 and SEQ ID NO: 48; SEQ ID NO: 27 and SEQ ID NO: 53; SEQ ID NO: 27 and SEQ ID NO: 54; SEQ ID NO: 27 and SEQ ID NO: 55; SEQ ID NO: 27 and SEQ ID NO: 56; SEQ ID NO: 27 and SEQ ID NO: 57; SEQ ID NO: 27 and SEQ ID NO: 58; SEQ ID NO: 27 and SEQ ID NO: 59; SEQ ID NO: 27 and SEQ ID NO: 60; SEQ ID NO: 27 and SEQ ID NO: 61; SEQ ID NO: 27 and SEQ ID NO: 62; SEQ ID NO: 27 and SEQ ID NO: 63; SEQ ID NO: 27 and SEQ ID NO: 64; SEQ ID NO: 27 and SEQ ID NO: 65; SEQ ID NO: 27 and SEQ ID NO: 66; SEQ ID NO: 27 and SEQ ID NO: 67; SEQ ID NO: 27 and SEQ ID NO: 68; SEQ ID NO: 27 and SEQ ID NO: 69; SEQ ID NO: 28 and SEQ ID NO: 29; SEQ ID NO: 28 and SEQ ID NO: 30; SEQ ID NO: 28 and SEQ ID NO: 31; SEQ ID NO: 28 and SEQ ID NO: 32; SEQ ID NO: 28 and SEQ ID NO: 33; SEQ ID NO: 28 and SEQ ID NO: 34; SEQ ID NO: 28 and SEQ ID NO: 35; SEQ ID NO: 28 and SEQ ID NO: 36; SEQ ID NO: 28 and SEQ ID NO: 37; SEQ ID NO: 28 and SEQ ID NO: 38; SEQ ID NO: 28 and SEQ ID NO: 39; SEQ ID NO: 28 and SEQ ID NO: 40; SEQ ID NO: 28 and SEQ ID NO: 41; SEQ ID NO: 28 and SEQ ID NO: 42; SEQ ID NO: 28 and SEQ ID NO: 43; SEQ ID NO: 28 and SEQ ID NO: 44; SEQ ID NO: 28 and SEQ ID NO: 45; SEQ ID NO: 28 and SEQ ID NO: 46; SEQ ID NO: 28 and SEQ ID NO: 47; SEQ ID NO: 28 and SEQ ID NO: 48; SEQ ID NO: 28 and SEQ ID NO: 53; SEQ ID NO: 28 and SEQ ID NO: 54; SEQ ID NO: 28 and SEQ ID NO: 55; SEQ ID NO: 28 and SEQ ID NO: 56; SEQ ID NO: 28 and SEQ ID NO: 57; SEQ ID NO: 28 and SEQ ID NO: 58; SEQ ID NO: 28 and SEQ ID NO: 59; SEQ ID NO: 28 and SEQ ID NO: 60; SEQ ID NO: 28 and SEQ ID NO: 61; SEQ ID NO: 28 and SEQ ID NO: 62; SEQ ID NO: 28 and SEQ ID NO: 63; SEQ ID NO: 28 and SEQ ID NO: 64; SEQ ID NO: 28 and SEQ ID NO: 65; SEQ ID NO: 28 and SEQ ID NO: 66; SEQ ID NO: 28 and SEQ ID NO: 67; SEQ ID NO: 28 and SEQ ID NO: 68; SEQ ID NO: 28 and SEQ ID NO: 69; SEQ ID NO: 29 and SEQ ID NO: 30; SEQ ID NO: 29 and SEQ ID NO: 31; SEQ ID NO: 29 and SEQ ID NO: 32; SEQ ID NO: 29 and SEQ ID NO: 33; SEQ ID NO: 29 and SEQ ID NO: 34; SEQ ID NO: 29 and SEQ ID NO: 35; SEQ ID NO: 29 and SEQ ID NO: 36; SEQ ID NO: 29 and SEQ ID NO: 37; SEQ ID NO: 29 and SEQ ID NO: 38; SEQ ID NO: 29 and SEQ ID NO: 39; SEQ ID NO: 29 and SEQ ID NO: 40; SEQ ID NO: 29 and SEQ ID NO: 41; SEQ ID NO: 29 and SEQ ID NO: 42; SEQ ID NO: 29 and SEQ ID NO: 43; SEQ ID NO: 29 and SEQ ID NO: 44; SEQ ID NO: 29 and SEQ ID NO: 45; SEQ ID NO: 29 and SEQ ID NO: 46; SEQ ID NO: 29 and SEQ ID NO: 47; SEQ ID NO: 29 and SEQ ID NO: 48; SEQ ID NO: 29 and SEQ ID NO: 53; SEQ ID NO: 29 and SEQ ID NO: 54; SEQ ID NO: 29 and SEQ ID NO: 55; SEQ ID NO: 29 and SEQ ID NO: 56; SEQ ID NO: 29 and SEQ ID NO: 57; SEQ ID NO: 29 and SEQ ID NO: 58; SEQ ID NO: 29 and SEQ ID NO: 59; SEQ ID NO: 29 and SEQ ID NO: 60; SEQ ID NO: 29 and SEQ ID NO: 61; SEQ ID NO: 29 and SEQ ID NO: 62; SEQ ID NO: 29 and SEQ ID NO: 63; SEQ ID NO: 29 and SEQ ID NO: 64; SEQ ID NO: 29 and SEQ ID NO: 65; SEQ ID NO: 29 and SEQ ID NO: 66; SEQ ID NO: 29 and SEQ ID NO: 67; SEQ ID NO: 29 and SEQ ID NO: 68; SEQ ID NO: 29 and SEQ ID NO: 69; SEQ ID NO: 30 and SEQ ID NO: 31; SEQ ID NO: 30 and SEQ ID NO: 32; SEQ ID NO: 30 and SEQ ID NO: 33; SEQ ID NO: 30 and SEQ ID NO: 34; SEQ ID NO: 30 and SEQ ID NO: 35; SEQ ID NO: 30 and SEQ ID NO: 36; SEQ ID NO: 30 and SEQ ID NO: 37; SEQ ID NO: 30 and SEQ ID NO: 38; SEQ ID NO: 30 and SEQ ID NO: 39; SEQ ID NO: 30 and SEQ ID NO: 40; SEQ ID NO: 30 and SEQ ID NO: 41; SEQ ID NO: 30 and SEQ ID NO: 42; SEQ ID NO: 30 and SEQ ID NO: 43; SEQ ID NO: 30 and SEQ ID NO: 44; SEQ ID NO: 30 and SEQ ID NO: 45; SEQ ID NO: 30 and SEQ ID NO: 46; SEQ ID NO: 30 and SEQ ID NO: 47; SEQ ID NO: 30 and SEQ ID NO: 48; SEQ ID NO: 30 and SEQ ID NO: 53; SEQ ID NO: 30 and SEQ ID NO: 54; SEQ ID NO: 30 and SEQ ID NO: 55; SEQ ID NO: 30 and SEQ ID NO: 56; SEQ ID NO: 30 and SEQ ID NO: 57; SEQ ID NO: 30 and SEQ ID NO: 58; SEQ ID NO: 30 and SEQ ID NO: 59; SEQ ID NO: 30 and SEQ ID NO: 60; SEQ ID NO: 30 and SEQ ID NO: 61; SEQ ID NO: 30 and SEQ ID NO: 62; SEQ ID NO: 30 and SEQ ID NO: 63; SEQ ID NO: 30 and SEQ ID NO: 64; SEQ ID NO: 30 and SEQ ID NO: 65; SEQ ID NO: 30 and SEQ ID NO: 66; SEQ ID NO: 30 and SEQ ID NO: 67; SEQ ID NO: 30 and SEQ ID NO: 68; SEQ ID NO: 30 and SEQ ID NO: 69; SEQ ID NO: 31 and SEQ ID NO: 32; SEQ ID NO: 31 and SEQ ID NO: 33; SEQ ID NO: 31 and SEQ ID NO: 34; SEQ ID NO: 31 and SEQ ID NO: 35; SEQ ID NO: 31 and SEQ ID NO: 36; SEQ ID NO: 31 and SEQ ID NO: 37; SEQ ID NO: 31 and SEQ ID NO: 38; SEQ ID NO: 31 and SEQ ID NO: 39; SEQ ID NO: 31 and SEQ ID NO: 40; SEQ ID NO: 31 and SEQ ID NO: 41; SEQ ID NO: 31 and SEQ ID NO: 42; SEQ ID NO: 31 and SEQ ID NO: 43; SEQ ID NO: 31 and SEQ ID NO: 44; SEQ ID NO: 31 and SEQ ID NO: 45; SEQ ID NO: 31 and SEQ ID NO: 46; SEQ ID NO: 31 and SEQ ID NO: 47; SEQ ID NO: 31 and SEQ ID NO: 48; SEQ ID NO: 31 and SEQ ID NO: 53; SEQ ID NO: 31 and SEQ ID NO: 54; SEQ ID NO: 31 and SEQ ID NO: 55; SEQ ID NO: 31 and SEQ ID NO: 56; SEQ ID NO: 31 and SEQ ID NO: 57; SEQ ID NO: 31 and SEQ ID NO: 58; SEQ ID NO: 31 and SEQ ID NO: 59; SEQ ID NO: 31 and SEQ ID NO: 60; SEQ ID NO: 31 and SEQ ID NO: 61; SEQ ID NO: 31 and SEQ ID NO: 62; SEQ ID NO: 31 and SEQ ID NO: 63; SEQ ID NO: 31 and SEQ ID NO: 64; SEQ ID NO: 31 and SEQ ID NO: 65; SEQ ID NO: 31 and SEQ ID NO: 66; SEQ ID NO: 31 and SEQ ID NO: 67; SEQ ID NO: 31 and SEQ ID NO: 68; SEQ ID NO: 31 and SEQ ID NO: 69; SEQ ID NO: 32 and SEQ ID NO: 33; SEQ ID NO: 32 and SEQ ID NO: 34; SEQ ID NO: 32 and SEQ ID NO: 35; SEQ ID NO: 32 and SEQ ID NO: 36; SEQ ID NO: 32 and SEQ ID NO: 37; SEQ ID NO: 32 and SEQ ID NO: 38; SEQ ID NO: 32 and SEQ ID NO: 39; SEQ ID NO: 32 and SEQ ID NO: 40; SEQ ID NO: 32 and SEQ ID NO: 41; SEQ ID NO: 32 and SEQ ID NO: 42; SEQ ID NO: 32 and SEQ ID NO: 43; SEQ ID NO: 32 and SEQ ID NO: 44; SEQ ID NO: 32 and SEQ ID NO: 45; SEQ ID NO: 32 and SEQ ID NO: 46; SEQ ID NO: 32 and SEQ ID NO: 47; SEQ ID NO: 32 and SEQ ID NO: 48; SEQ ID NO: 32 and SEQ ID NO: 53; SEQ ID NO: 32 and SEQ ID NO: 54; SEQ ID NO: 32 and SEQ ID NO: 55; SEQ ID NO: 32 and SEQ ID NO: 56; SEQ ID NO: 32 and SEQ ID NO: 57; SEQ ID NO: 32 and SEQ ID NO: 58; SEQ ID NO: 32 and SEQ ID NO: 59; SEQ ID NO: 32 and SEQ ID NO: 60; SEQ ID NO: 32 and SEQ ID NO: 61; SEQ ID NO: 32 and SEQ ID NO: 62; SEQ ID NO: 32 and SEQ ID NO: 63; SEQ ID NO: 32 and SEQ ID NO: 64; SEQ ID NO: 32 and SEQ ID NO: 65; SEQ ID NO: 32 and SEQ ID NO: 66; SEQ ID NO: 32 and SEQ ID NO: 67; SEQ ID NO: 32 and SEQ ID NO: 68; SEQ ID NO: 32 and SEQ ID NO: 69; SEQ ID NO: 33 and SEQ ID NO: 34; SEQ ID NO: 33 and SEQ ID NO: 35; SEQ ID NO: 33 and SEQ ID NO: 36; SEQ ID NO: 33 and SEQ ID NO: 37; SEQ ID NO: 33 and SEQ ID NO: 38; SEQ ID NO: 33 and SEQ ID NO: 39; SEQ ID NO: 33 and SEQ ID NO: 40; SEQ ID NO: 33 and SEQ ID NO: 41; SEQ ID NO: 33 and SEQ ID NO: 42; SEQ ID NO: 33 and SEQ ID NO: 43; SEQ ID NO: 33 and SEQ ID NO: 44; SEQ ID NO: 33 and SEQ ID NO: 45; SEQ ID NO: 33 and SEQ ID NO: 46; SEQ ID NO: 33 and SEQ ID NO: 47; SEQ ID NO: 33 and SEQ ID NO: 48; SEQ ID NO: 33 and SEQ ID NO: 53; SEQ ID NO: 33 and SEQ ID NO: 54; SEQ ID NO: 33 and SEQ ID NO: 55; SEQ ID NO: 33 and SEQ ID NO: 56; SEQ ID NO: 33 and SEQ ID NO: 57; SEQ ID NO: 33 and SEQ ID NO: 58; SEQ ID NO: 33 and SEQ ID NO: 59; SEQ ID NO: 33 and SEQ ID NO: 60; SEQ ID NO: 33 and SEQ ID NO: 61; SEQ ID NO: 33 and SEQ ID NO: 62; SEQ ID NO: 33 and SEQ ID NO: 63; SEQ ID NO: 33 and SEQ ID NO: 64; SEQ ID NO: 33 and SEQ ID NO: 65; SEQ ID NO: 33 and SEQ ID NO: 66; SEQ ID NO: 33 and SEQ ID NO: 67; SEQ ID NO: 33 and SEQ ID NO: 68; SEQ ID NO: 33 and SEQ ID NO: 69; SEQ ID NO: 34 and SEQ ID NO: 35; SEQ ID NO: 34 and SEQ ID NO: 36; SEQ ID NO: 34 and SEQ ID NO: 37; SEQ ID NO: 34 and SEQ ID NO: 38; SEQ ID NO: 34 and SEQ ID NO: 39; SEQ ID NO: 34 and SEQ ID NO: 40; SEQ ID NO: 34 and SEQ ID NO: 41; SEQ ID NO: 34 and SEQ ID NO: 42; SEQ ID NO: 34 and SEQ ID NO: 43; SEQ ID NO: 34 and SEQ ID NO: 44; SEQ ID NO: 34 and SEQ ID NO: 45; SEQ ID NO: 34 and SEQ ID NO: 46; SEQ ID NO: 34 and SEQ ID NO: 47; SEQ ID NO: 34 and SEQ ID NO: 48; SEQ ID NO: 34 and SEQ ID NO: 53; SEQ ID NO: 34 and SEQ ID NO: 54; SEQ ID NO: 34 and SEQ ID NO: 55; SEQ ID NO: 34 and SEQ ID NO: 56; SEQ ID NO: 34 and SEQ ID NO: 57; SEQ ID NO: 34 and SEQ ID NO: 58; SEQ ID NO: 34 and SEQ ID NO: 59; SEQ ID NO: 34 and SEQ ID NO: 60; SEQ ID NO: 34 and SEQ ID NO: 61; SEQ ID NO: 34 and SEQ ID NO: 62; SEQ ID NO: 34 and SEQ ID NO: 63; SEQ ID NO: 34 and SEQ ID NO: 64; SEQ ID NO: 34 and SEQ ID NO: 65; SEQ ID NO: 34 and SEQ ID NO: 66; SEQ ID NO: 34 and SEQ ID NO: 67; SEQ ID NO: 34 and SEQ ID NO: 68; SEQ ID NO: 34 and SEQ ID NO: 69; SEQ ID NO: 35 and SEQ ID NO: 36; SEQ ID NO: 35 and SEQ ID NO: 37; SEQ ID NO: 35 and SEQ ID NO: 38; SEQ ID NO: 35 and SEQ ID NO: 39; SEQ ID NO: 35 and SEQ ID NO: 40; SEQ ID NO: 35 and SEQ ID NO: 41; SEQ ID NO: 35 and SEQ ID NO: 42; SEQ ID NO: 35 and SEQ ID NO: 43; SEQ ID NO: 35 and SEQ ID NO: 44; SEQ ID NO: 35 and SEQ ID NO: 45; SEQ ID NO: 35 and SEQ ID NO: 46; SEQ ID NO: 35 and SEQ ID NO: 47; SEQ ID NO: 35 and SEQ ID NO: 48; SEQ ID NO: 35 and SEQ ID NO: 53; SEQ ID NO: 35 and SEQ ID NO: 54; SEQ ID NO: 35 and SEQ ID NO: 55; SEQ ID NO: 35 and SEQ ID NO: 56; SEQ ID NO: 35 and SEQ ID NO: 57; SEQ ID NO: 35 and SEQ ID NO: 58; SEQ ID NO: 35 and SEQ ID NO: 59; SEQ ID NO: 35 and SEQ ID NO: 60; SEQ ID NO: 35 and SEQ ID NO: 61; SEQ ID NO: 35 and SEQ ID NO: 62; SEQ ID NO: 35 and SEQ ID NO: 63; SEQ ID NO: 35 and SEQ ID NO: 64; SEQ ID NO: 35 and SEQ ID NO: 65; SEQ ID NO: 35 and SEQ ID NO: 66; SEQ ID NO: 35 and SEQ ID NO: 67; SEQ ID NO: 35 and SEQ ID NO: 68; SEQ ID NO: 35 and SEQ ID NO: 69; SEQ ID NO: 36 and SEQ ID NO: 37; SEQ ID NO: 36 and SEQ ID NO: 38; SEQ ID NO: 36 and SEQ ID NO: 39; SEQ ID NO: 36 and SEQ ID NO: 40; SEQ ID NO: 36 and SEQ ID NO: 41; SEQ ID NO: 36 and SEQ ID NO: 42; SEQ ID NO: 36 and SEQ ID NO: 43; SEQ ID NO: 36 and SEQ ID NO: 44; SEQ ID NO: 36 and SEQ ID NO: 45; SEQ ID NO: 36 and SEQ ID NO: 46; SEQ ID NO: 36 and SEQ ID NO: 47; SEQ ID NO: 36 and SEQ ID NO: 48; SEQ ID NO: 36 and SEQ ID NO: 53; SEQ ID NO: 36 and SEQ ID NO: 54; SEQ ID NO: 36 and SEQ ID NO: 55; SEQ ID NO: 36 and SEQ ID NO: 56; SEQ ID NO: 36 and SEQ ID NO: 57; SEQ ID NO: 36 and SEQ ID NO: 58; SEQ ID NO: 36 and SEQ ID NO: 59; SEQ ID NO: 36 and SEQ ID NO: 60; SEQ ID NO: 36 and SEQ ID NO: 61; SEQ ID NO: 36 and SEQ ID NO: 62; SEQ ID NO: 36 and SEQ ID NO: 63; SEQ ID NO: 36 and SEQ ID NO: 64; SEQ ID NO: 36 and SEQ ID NO: 65; SEQ ID NO: 36 and SEQ ID NO: 66; SEQ ID NO: 36 and SEQ ID NO: 67; SEQ ID NO: 36 and SEQ ID NO: 68; SEQ ID NO: 36 and SEQ ID NO: 69; SEQ ID NO: 37 and SEQ ID NO: 38; SEQ ID NO: 37 and SEQ ID NO: 39; SEQ ID NO: 37 and SEQ ID NO: 40; SEQ ID NO: 37 and SEQ ID NO: 41; SEQ ID NO: 37 and SEQ ID NO: 42; SEQ ID NO: 37 and SEQ ID NO: 43; SEQ ID NO: 37 and SEQ ID NO: 44; SEQ ID NO: 37 and SEQ ID NO: 45; SEQ ID NO: 37 and SEQ ID NO: 46; SEQ ID NO: 37 and SEQ ID NO: 47; SEQ ID NO: 37 and SEQ ID NO: 48; SEQ ID NO: 37 and SEQ ID NO: 53; SEQ ID NO: 37 and SEQ ID NO: 54; SEQ ID NO: 37 and SEQ ID NO: 55; SEQ ID NO: 37 and SEQ ID NO: 56; SEQ ID NO: 37 and SEQ ID NO: 57; SEQ ID NO: 37 and SEQ ID NO: 58; SEQ ID NO: 37 and SEQ ID NO: 59; SEQ ID NO: 37 and SEQ ID NO: 60; SEQ ID NO: 37 and SEQ ID NO: 61; SEQ ID NO: 37 and SEQ ID NO: 62; SEQ ID NO: 37 and SEQ ID NO: 63; SEQ ID NO: 37 and SEQ ID NO: 64; SEQ ID NO: 37 and SEQ ID NO: 65; SEQ ID NO: 37 and SEQ ID NO: 66; SEQ ID NO: 37 and SEQ ID NO: 67; SEQ ID NO: 37 and SEQ ID NO: 68; SEQ ID NO: 37 and SEQ ID NO: 69; SEQ ID NO: 38 and SEQ ID NO: 39; SEQ ID NO: 38 and SEQ ID NO: 40; SEQ ID NO: 38 and SEQ ID NO: 41; SEQ ID NO: 38 and SEQ ID NO: 42; SEQ ID NO: 38 and SEQ ID NO: 43; SEQ ID NO: 38 and SEQ ID NO: 44; SEQ ID NO: 38 and SEQ ID NO: 45; SEQ ID NO: 38 and SEQ ID NO: 46; SEQ ID NO: 38 and SEQ ID NO: 47; SEQ ID NO: 38 and SEQ ID NO: 48; SEQ ID NO: 38 and SEQ ID NO: 53; SEQ ID NO: 38 and SEQ ID NO: 54; SEQ ID NO: 38 and SEQ ID NO: 55; SEQ ID NO: 38 and SEQ ID NO: 56; SEQ ID NO: 38 and SEQ ID NO: 57; SEQ ID NO: 38 and SEQ ID NO: 58; SEQ ID NO: 38 and SEQ ID NO: 59; SEQ ID NO: 38 and SEQ ID NO: 60; SEQ ID NO: 38 and SEQ ID NO: 61; SEQ ID NO: 38 and SEQ ID NO: 62; SEQ ID NO: 38 and SEQ ID NO: 63; SEQ ID NO: 38 and SEQ ID NO: 64; SEQ ID NO: 38 and SEQ ID NO: 65; SEQ ID NO: 38 and SEQ ID NO: 66; SEQ ID NO: 38 and SEQ ID NO: 67; SEQ ID NO: 38 and SEQ ID NO: 68; SEQ ID NO: 38 and SEQ ID NO: 69; SEQ ID NO: 39 and SEQ ID NO: 40; SEQ ID NO: 39 and SEQ ID NO: 41; SEQ ID NO: 39 and SEQ ID NO: 42; SEQ ID NO: 39 and SEQ ID NO: 43; SEQ ID NO: 39 and SEQ ID NO: 44; SEQ ID NO: 39 and SEQ ID NO: 45; SEQ ID NO: 39 and SEQ ID NO: 46; SEQ ID NO: 39 and SEQ ID NO: 47; SEQ ID NO: 39 and SEQ ID NO: 48; SEQ ID NO: 39 and SEQ ID NO: 53; SEQ ID NO: 39 and SEQ ID NO: 54; SEQ ID NO: 39 and SEQ ID NO: 55; SEQ ID NO: 39 and SEQ ID NO: 56; SEQ ID NO: 39 and SEQ ID NO: 57; SEQ ID NO: 39 and SEQ ID NO: 58; SEQ ID NO: 39 and SEQ ID NO: 59; SEQ ID NO: 39 and SEQ ID NO: 60; SEQ ID NO: 39 and SEQ ID NO: 61; SEQ ID NO: 39 and SEQ ID NO: 62; SEQ ID NO: 39 and SEQ ID NO: 63; SEQ ID NO: 39 and SEQ ID NO: 64; SEQ ID NO: 39 and SEQ ID NO: 65; SEQ ID NO: 39 and SEQ ID NO: 66; SEQ ID NO: 39 and SEQ ID NO: 67; SEQ ID NO: 39 and SEQ ID NO: 68; SEQ ID NO: 39 and SEQ ID NO: 69; SEQ ID NO: 40 and SEQ ID NO: 41; SEQ ID NO: 40 and SEQ ID NO: 42; SEQ ID NO: 40 and SEQ ID NO: 43; SEQ ID NO: 40 and SEQ ID NO: 44; SEQ ID NO: 40 and SEQ ID NO: 45; SEQ ID NO: 40 and SEQ ID NO: 46; SEQ ID NO: 40 and SEQ ID NO: 47; SEQ ID NO: 40 and SEQ ID NO: 48; SEQ ID NO: 40 and SEQ ID NO: 53; SEQ ID NO: 40 and SEQ ID NO: 54; SEQ ID NO: 40 and SEQ ID NO: 55; SEQ ID NO: 40 and SEQ ID NO: 56; SEQ ID NO: 40 and SEQ ID NO: 57; SEQ ID NO: 40 and SEQ ID NO: 58; SEQ ID NO: 40 and SEQ ID NO: 59; SEQ ID NO: 40 and SEQ ID NO: 60; SEQ ID NO: 40 and SEQ ID NO: 61; SEQ ID NO: 40 and SEQ ID NO: 62; SEQ ID NO: 40 and SEQ ID NO: 63; SEQ ID NO: 40 and SEQ ID NO: 64; SEQ ID NO: 40 and SEQ ID NO: 65; SEQ ID NO: 40 and SEQ ID NO: 66; SEQ ID NO: 40 and SEQ ID NO: 67; SEQ ID NO: 40 and SEQ ID NO: 68; SEQ ID NO: 40 and SEQ ID NO: 69; SEQ ID NO: 41 and SEQ ID NO: 42; SEQ ID NO: 41 and SEQ ID NO: 43; SEQ ID NO: 41 and SEQ ID NO: 44; SEQ ID NO: 41 and SEQ ID NO: 45; SEQ ID NO: 41 and SEQ ID NO: 46; SEQ ID NO: 41 and SEQ ID NO: 47; SEQ ID NO: 41 and SEQ ID NO: 48; SEQ ID NO: 41 and SEQ ID NO: 53; SEQ ID NO: 41 and SEQ ID NO: 54; SEQ ID NO: 41 and SEQ ID NO: 55; SEQ ID NO: 41 and SEQ ID NO: 56; SEQ ID NO: 41 and SEQ ID NO: 57; SEQ ID NO: 41 and SEQ ID NO: 58; SEQ ID NO: 41 and SEQ ID NO: 59; SEQ ID NO: 41 and SEQ ID NO: 60; SEQ ID NO: 41 and SEQ ID NO: 61; SEQ ID NO: 41 and SEQ ID NO: 62; SEQ ID NO: 41 and SEQ ID NO: 63; SEQ ID NO: 41 and SEQ ID NO: 64; SEQ ID NO: 41 and SEQ ID NO: 65; SEQ ID NO: 41 and SEQ ID NO: 66; SEQ ID NO: 41 and SEQ ID NO: 67; SEQ ID NO: 41 and SEQ ID NO: 68; SEQ ID NO: 41 and SEQ ID NO: 69; SEQ ID NO: 42 and SEQ ID NO: 43; SEQ ID NO: 42 and SEQ ID NO: 44; SEQ ID NO: 42 and SEQ ID NO: 45; SEQ ID NO: 42 and SEQ ID NO: 46; SEQ ID NO: 42 and SEQ ID NO: 47; SEQ ID NO: 42 and SEQ ID NO: 48; SEQ ID NO: 42 and SEQ ID NO: 53; SEQ ID NO: 42 and SEQ ID NO: 54; SEQ ID NO: 42 and SEQ ID NO: 55; SEQ ID NO: 42 and SEQ ID NO: 56; SEQ ID NO: 42 and SEQ ID NO: 57; SEQ ID NO: 42 and SEQ ID NO: 58; SEQ ID NO: 42 and SEQ ID NO: 59; SEQ ID NO: 42 and SEQ ID NO: 60; SEQ ID NO: 42 and SEQ ID NO: 61; SEQ ID NO: 42 and SEQ ID NO: 62; SEQ ID NO: 42 and SEQ ID NO: 63; SEQ ID NO: 42 and SEQ ID NO: 64; SEQ ID NO: 42 and SEQ ID NO: 65; SEQ ID NO: 42 and SEQ ID NO: 66; SEQ ID NO: 42 and SEQ ID NO: 67; SEQ ID NO: 42 and SEQ ID NO: 68; SEQ ID NO: 42 and SEQ ID NO: 69; SEQ ID NO: 43 and SEQ ID NO: 44; SEQ ID NO: 43 and SEQ ID NO: 45; SEQ ID NO: 43 and SEQ ID NO: 46; SEQ ID NO: 43 and SEQ ID NO: 47; SEQ ID NO: 43 and SEQ ID NO: 48; SEQ ID NO: 43 and SEQ ID NO: 53; SEQ ID NO: 43 and SEQ ID NO: 54; SEQ ID NO: 43 and SEQ ID NO: 55; SEQ ID NO: 43 and SEQ ID NO: 56; SEQ ID NO: 43 and SEQ ID NO: 57; SEQ ID NO: 43 and SEQ ID NO: 58; SEQ ID NO: 43 and SEQ ID NO: 59; SEQ ID NO: 43 and SEQ ID NO: 60; SEQ ID NO: 43 and SEQ ID NO: 61; SEQ ID NO: 43 and SEQ ID NO: 62; SEQ ID NO: 43 and SEQ ID NO: 63; SEQ ID NO: 43 and SEQ ID NO: 64; SEQ ID NO: 43 and SEQ ID NO: 65; SEQ ID NO: 43 and SEQ ID NO: 66; SEQ ID NO: 43 and SEQ ID NO: 67; SEQ ID NO: 43 and SEQ ID NO: 68; SEQ ID NO: 43 and SEQ ID NO: 69; SEQ ID NO: 44 and SEQ ID NO: 45; SEQ ID NO: 44 and SEQ ID NO: 46; SEQ ID NO: 44 and SEQ ID NO: 47; SEQ ID NO: 44 and SEQ ID NO: 48; SEQ ID NO: 44 and SEQ ID NO: 53; SEQ ID NO: 44 and SEQ ID NO: 54; SEQ ID NO: 44 and SEQ ID NO: 55; SEQ ID NO: 44 and SEQ ID NO: 56; SEQ ID NO: 44 and SEQ ID NO: 57; SEQ ID NO: 44 and SEQ ID NO: 58; SEQ ID NO: 44 and SEQ ID NO: 59; SEQ ID NO: 44 and SEQ ID NO: 60; SEQ ID NO: 44 and SEQ ID NO: 61; SEQ ID NO: 44 and SEQ ID NO: 62; SEQ ID NO: 44 and SEQ ID NO: 63; SEQ ID NO: 44 and SEQ ID NO: 64; SEQ ID NO: 44 and SEQ ID NO: 65; SEQ ID NO: 44 and SEQ ID NO: 66; SEQ ID NO: 44 and SEQ ID NO: 67; SEQ ID NO: 44 and SEQ ID NO: 68; SEQ ID NO: 44 and SEQ ID NO: 69; SEQ ID NO: 45 and SEQ ID NO: 46; SEQ ID NO: 45 and SEQ ID NO: 47; SEQ ID NO: 45 and SEQ ID NO: 48; SEQ ID NO: 45 and SEQ ID NO: 53; SEQ ID NO: 45 and SEQ ID NO: 54; SEQ ID NO: 45 and SEQ ID NO: 55; SEQ ID NO: 45 and SEQ ID NO: 56; SEQ ID NO: 45 and SEQ ID NO: 57; SEQ ID NO: 45 and SEQ ID NO: 58; SEQ ID NO: 45 and SEQ ID NO: 59; SEQ ID NO: 45 and SEQ ID NO: 60; SEQ ID NO: 45 and SEQ ID NO: 61; SEQ ID NO: 45 and SEQ ID NO: 62; SEQ ID NO: 45 and SEQ ID NO: 63; SEQ ID NO: 45 and SEQ ID NO: 64; SEQ ID NO: 45 and SEQ ID NO: 65; SEQ ID NO: 45 and SEQ ID NO: 66; SEQ ID NO: 45 and SEQ ID NO: 67; SEQ ID NO: 45 and SEQ ID NO: 68; SEQ ID NO: 45 and SEQ ID NO: 69; SEQ ID NO: 46 and SEQ ID NO: 47; SEQ ID NO: 46 and SEQ ID NO: 48; SEQ ID NO: 46 and SEQ ID NO: 53; SEQ ID NO: 46 and SEQ ID NO: 54; SEQ ID NO: 46 and SEQ ID NO: 55; SEQ ID NO: 46 and SEQ ID NO: 56; SEQ ID NO: 46 and SEQ ID NO: 57; SEQ ID NO: 46 and SEQ ID NO: 58; SEQ ID NO: 46 and SEQ ID NO: 59; SEQ ID NO: 46 and SEQ ID NO: 60; SEQ ID NO: 46 and SEQ ID NO: 61; SEQ ID NO: 46 and SEQ ID NO: 62; SEQ ID NO: 46 and SEQ ID NO: 63; SEQ ID NO: 46 and SEQ ID NO: 64; SEQ ID NO: 46 and SEQ ID NO: 65; SEQ ID NO: 46 and SEQ ID NO: 66; SEQ ID NO: 46 and SEQ ID NO: 67; SEQ ID NO: 46 and SEQ ID NO: 68; SEQ ID NO: 46 and SEQ ID NO: 69; SEQ ID NO: 47 and SEQ ID NO: 48; SEQ ID NO: 47 and SEQ ID NO: 53; SEQ ID NO: 47 and SEQ ID NO: 54; SEQ ID NO: 47 and SEQ ID NO: 55; SEQ ID NO: 47 and SEQ ID NO: 56; SEQ ID NO: 47 and SEQ ID NO: 57; SEQ ID NO: 47 and SEQ ID NO: 58; SEQ ID NO: 47 and SEQ ID NO: 59; SEQ ID NO: 47 and SEQ ID NO: 60; SEQ ID NO: 47 and SEQ ID NO: 61; SEQ ID NO: 47 and SEQ ID NO: 62; SEQ ID NO: 47 and SEQ ID NO: 63; SEQ ID NO: 47 and SEQ ID NO: 64; SEQ ID NO: 47 and SEQ ID NO: 65; SEQ ID NO: 47 and SEQ ID NO: 66; SEQ ID NO: 47 and SEQ ID NO: 67; SEQ ID NO: 47 and SEQ ID NO: 68; SEQ ID NO: 47 and SEQ ID NO: 69; SEQ ID NO: 48 and SEQ ID NO: 53; SEQ ID NO: 48 and SEQ ID NO: 54; SEQ ID NO: 48 and SEQ ID NO: 55; SEQ ID NO: 48 and SEQ ID NO: 56; SEQ ID NO: 48 and SEQ ID NO: 57; SEQ ID NO: 48 and SEQ ID NO: 58; SEQ ID NO: 48 and SEQ ID NO: 59; SEQ ID NO: 48 and SEQ ID NO: 60; SEQ ID NO: 48 and SEQ ID NO: 61; SEQ ID NO: 48 and SEQ ID NO: 62; SEQ ID NO: 48 and SEQ ID NO: 63; SEQ ID NO: 48 and SEQ ID NO: 64; SEQ ID NO: 48 and SEQ ID NO: 65; SEQ ID NO: 48 and SEQ ID NO: 66; SEQ ID NO: 48 and SEQ ID NO: 67; SEQ ID NO: 48 and SEQ ID NO: 68; SEQ ID NO: 48 and SEQ ID NO: 69; SEQ ID NO: 53 and SEQ ID NO: 54; SEQ ID NO: 53 and SEQ ID NO: 55; SEQ ID NO: 53 and SEQ ID NO: 56; SEQ ID NO: 53 and SEQ ID NO: 57; SEQ ID NO: 53 and SEQ ID NO: 58; SEQ ID NO: 53 and SEQ ID NO: 59; SEQ ID NO: 53 and SEQ ID NO: 60; SEQ ID NO: 53 and SEQ ID NO: 61; SEQ ID NO: 53 and SEQ ID NO: 62; SEQ ID NO: 53 and SEQ ID NO: 63; SEQ ID NO: 53 and SEQ ID NO: 64; SEQ ID NO: 53 and SEQ ID NO: 65; SEQ ID NO: 53 and SEQ ID NO: 66; SEQ ID NO: 53 and SEQ ID NO: 67; SEQ ID NO: 53 and SEQ ID NO: 68; SEQ ID NO: 53 and SEQ ID NO: 69; SEQ ID NO: 54 and SEQ ID NO: 55; SEQ ID NO: 54 and SEQ ID NO: 56; SEQ ID NO: 54 and SEQ ID NO: 57; SEQ ID NO: 54 and SEQ ID NO: 58; SEQ ID NO: 54 and SEQ ID NO: 59; SEQ ID NO: 54 and SEQ ID NO: 60; SEQ ID NO: 54 and SEQ ID NO: 61; SEQ ID NO: 54 and SEQ ID NO: 62; SEQ ID NO: 54 and SEQ ID NO: 63; SEQ ID NO: 54 and SEQ ID NO: 64; SEQ ID NO: 54 and SEQ ID NO: 65; SEQ ID NO: 54 and SEQ ID NO: 66; SEQ ID NO: 54 and SEQ ID NO: 67; SEQ ID NO: 54 and SEQ ID NO: 68; SEQ ID NO: 54 and SEQ ID NO: 69; SEQ ID NO: 55 and SEQ ID NO: 56; SEQ ID NO: 55 and SEQ ID NO: 57; SEQ ID NO: 55 and SEQ ID NO: 58; SEQ ID NO: 55 and SEQ ID NO: 59; SEQ ID NO: 55 and SEQ ID NO: 60; SEQ ID NO: 55 and SEQ ID NO: 61; SEQ ID NO: 55 and SEQ ID NO: 62; SEQ ID NO: 55 and SEQ ID NO: 63; SEQ ID NO: 55 and SEQ ID NO: 64; SEQ ID NO: 55 and SEQ ID NO: 65; SEQ ID NO: 55 and SEQ ID NO: 66; SEQ ID NO: 55 and SEQ ID NO: 67; SEQ ID NO: 55 and SEQ ID NO: 68; SEQ ID NO: 55 and SEQ ID NO: 69; SEQ ID NO: 56 and SEQ ID NO: 57; SEQ ID NO: 56 and SEQ ID NO: 58; SEQ ID NO: 56 and SEQ ID NO: 59; SEQ ID NO: 56 and SEQ ID NO: 60; SEQ ID NO: 56 and SEQ ID NO: 61; SEQ ID NO: 56 and SEQ ID NO: 62; SEQ ID NO: 56 and SEQ ID NO: 63; SEQ ID NO: 56 and SEQ ID NO: 64; SEQ ID NO: 56 and SEQ ID NO: 65; SEQ ID NO: 56 and SEQ ID NO: 66; SEQ ID NO: 56 and SEQ ID NO: 67; SEQ ID NO: 56 and SEQ ID NO: 68; SEQ ID NO: 56 and SEQ ID NO: 69; SEQ ID NO: 57 and SEQ ID NO: 58; SEQ ID NO: 57 and SEQ ID NO: 59; SEQ ID NO: 57 and SEQ ID NO: 60; SEQ ID NO: 57 and SEQ ID NO: 61; SEQ ID NO: 57 and SEQ ID NO: 62; SEQ ID NO: 57 and SEQ ID NO: 63; SEQ ID NO: 57 and SEQ ID NO: 64; SEQ ID NO: 57 and SEQ ID NO: 65; SEQ ID NO: 57 and SEQ ID NO: 66; SEQ ID NO: 57 and SEQ ID NO: 67; SEQ ID NO: 57 and SEQ ID NO: 68; SEQ ID NO: 57 and SEQ ID NO: 69; SEQ ID NO: 58 and SEQ ID NO: 59; SEQ ID NO: 58 and SEQ ID NO: 60; SEQ ID NO: 58 and SEQ ID NO: 61; SEQ ID NO: 58 and SEQ ID NO: 62; SEQ ID NO: 58 and SEQ ID NO: 63; SEQ ID NO: 58 and SEQ ID NO: 64; SEQ ID NO: 58 and SEQ ID NO: 65; SEQ ID NO: 58 and SEQ ID NO: 66; SEQ ID NO: 58 and SEQ ID NO: 67; SEQ ID NO: 58 and SEQ ID NO: 68; SEQ ID NO: 58 and SEQ ID NO: 69; SEQ ID NO: 59 and SEQ ID NO: 60; SEQ ID NO: 59 and SEQ ID NO: 61; SEQ ID NO: 59 and SEQ ID NO: 62; SEQ ID NO: 59 and SEQ ID NO: 63; SEQ ID NO: 59 and SEQ ID NO: 64; SEQ ID NO: 59 and SEQ ID NO: 65; SEQ ID NO: 59 and SEQ ID NO: 66; SEQ ID NO: 59 and SEQ ID NO: 67; SEQ ID NO: 59 and SEQ ID NO: 68; SEQ ID NO: 59 and SEQ ID NO: 69; SEQ ID NO: 60 and SEQ ID NO: 61; SEQ ID NO: 60 and SEQ ID NO: 62; SEQ ID NO: 60 and SEQ ID NO: 63; SEQ ID NO: 60 and SEQ ID NO: 64; SEQ ID NO: 60 and SEQ ID NO: 65; SEQ ID NO: 60 and SEQ ID NO: 66; SEQ ID NO: 60 and SEQ ID NO: 67; SEQ ID NO: 60 and SEQ ID NO: 68; SEQ ID NO: 60 and SEQ ID NO: 69; SEQ ID NO: 61 and SEQ ID NO: 62; SEQ ID NO: 61 and SEQ ID NO: 63; SEQ ID NO: 61 and SEQ ID NO: 64; SEQ ID NO: 61 and SEQ ID NO: 65; SEQ ID NO: 61 and SEQ ID NO: 66; SEQ ID NO: 61 and SEQ ID NO: 67; SEQ ID NO: 61 and SEQ ID NO: 68; SEQ ID NO: 61 and SEQ ID NO: 69; SEQ ID NO: 62 and SEQ ID NO: 63; SEQ ID NO: 62 and SEQ ID NO: 64; SEQ ID NO: 62 and SEQ ID NO: 65; SEQ ID NO: 62 and SEQ ID NO: 66; SEQ ID NO: 62 and SEQ ID NO: 67; SEQ ID NO: 62 and SEQ ID NO: 68; SEQ ID NO: 62 and SEQ ID NO: 69; SEQ ID NO: 63 and SEQ ID NO: 64; SEQ ID NO: 63 and SEQ ID NO: 65; SEQ ID NO: 63 and SEQ ID NO: 66; SEQ ID NO: 63 and SEQ ID NO: 67; SEQ ID NO: 63 and SEQ ID NO: 68; SEQ ID NO: 63 and SEQ ID NO: 69; SEQ ID NO: 64 and SEQ ID NO: 65; SEQ ID NO: 64 and SEQ ID NO: 66; SEQ ID NO: 64 and SEQ ID NO: 67; SEQ ID NO: 64 and SEQ ID NO: 68; SEQ ID NO: 64 and SEQ ID NO: 69; SEQ ID NO: 65 and SEQ ID NO: 66; SEQ ID NO: 65 and SEQ ID NO: 67; SEQ ID NO: 65 and SEQ ID NO: 68; SEQ ID NO: 65 and SEQ ID NO: 69; SEQ ID NO: 66 and SEQ ID NO: 67; SEQ ID NO: 66 and SEQ ID NO: 68; SEQ ID NO: 66 and SEQ ID NO: 69; SEQ ID NO: 67 and SEQ ID NO: 68; SEQ ID NO: 67 and SEQ ID NO: 69; SEQ ID NO: 68 and SEQ ID NO: 69; SEQ ID NO: 71 and SEQ ID NO: 72; SEQ ID NO: 71 and SEQ ID NO: 73; SEQ ID NO: 71 and SEQ ID NO: 74; SEQ ID NO: 71 and SEQ ID NO: 75; SEQ ID NO: 71 and SEQ ID NO: 76; SEQ ID NO: 71 and SEQ ID NO: 77; SEQ ID NO: 71 and SEQ ID NO: 78; SEQ ID NO: 71 and SEQ ID NO: 84; SEQ ID NO: 71 and SEQ ID NO: 85; SEQ ID NO: 71 and SEQ ID NO: 86; SEQ ID NO: 71 and SEQ ID NO: 87; SEQ ID NO: 71 and SEQ ID NO: 88; SEQ ID NO: 71 and SEQ ID NO: 89; SEQ ID NO: 71 and SEQ ID NO: 90; SEQ ID NO: 71 and SEQ ID NO: 91; SEQ ID NO: 71 and SEQ ID NO: 92; SEQ ID NO: 71 and SEQ ID NO: 93; SEQ ID NO: 71 and SEQ ID NO: 94; SEQ ID NO: 71 and SEQ ID NO: 95; SEQ ID NO: 71 and SEQ ID NO: 96; SEQ ID NO: 71 and SEQ ID NO: 97; SEQ ID NO: 71 and SEQ ID NO: 98; SEQ ID NO: 71 and SEQ ID NO: 99; SEQ ID NO: 71 and SEQ ID NO: 100; SEQ ID NO: 71 and SEQ ID NO: 101; SEQ ID NO: 71 and SEQ ID NO: 102; SEQ ID NO: 72 and SEQ ID NO: 73; SEQ ID NO: 72 and SEQ ID NO: 74; SEQ ID NO: 72 and SEQ ID NO: 75; SEQ ID NO: 72 and SEQ ID NO: 76; SEQ ID NO: 72 and SEQ ID NO: 77; SEQ ID NO: 72 and SEQ ID NO: 78; SEQ ID NO: 72 and SEQ ID NO: 84; SEQ ID NO: 72 and SEQ ID NO: 85; SEQ ID NO: 72 and SEQ ID NO: 86; SEQ ID NO: 72 and SEQ ID NO: 87; SEQ ID NO: 72 and SEQ ID NO: 88; SEQ ID NO: 72 and SEQ ID NO: 89; SEQ ID NO: 72 and SEQ ID NO: 90; SEQ ID NO: 72 and SEQ ID NO: 91; SEQ ID NO: 72 and SEQ ID NO: 92; SEQ ID NO: 72 and SEQ ID NO: 93; SEQ ID NO: 72 and SEQ ID NO: 94; SEQ ID NO: 72 and SEQ ID NO: 95; SEQ ID NO: 72 and SEQ ID NO: 96; SEQ ID NO: 72 and SEQ ID NO: 97; SEQ ID NO: 72 and SEQ ID NO: 98; SEQ ID NO: 72 and SEQ ID NO: 99; SEQ ID NO: 72 and SEQ ID NO: 100; SEQ ID NO: 72 and SEQ ID NO: 101; SEQ ID NO: 72 and SEQ ID NO: 102; SEQ ID NO: 73 and SEQ ID NO: 74; SEQ ID NO: 73 and SEQ ID NO: 75; SEQ ID NO: 73 and SEQ ID NO: 76; SEQ ID NO: 73 and SEQ ID NO: 77; SEQ ID NO: 73 and SEQ ID NO: 78; SEQ ID NO: 73 and SEQ ID NO: 84; SEQ ID NO: 73 and SEQ ID NO: 85; SEQ ID NO: 73 and SEQ ID NO: 86; SEQ ID NO: 73 and SEQ ID NO: 87; SEQ ID NO: 73 and SEQ ID NO: 88; SEQ ID NO: 73 and SEQ ID NO: 89; SEQ ID NO: 73 and SEQ ID NO: 90; SEQ ID NO: 73 and SEQ ID NO: 91; SEQ ID NO: 73 and SEQ ID NO: 92; SEQ ID NO: 73 and SEQ ID NO: 93; SEQ ID NO: 73 and SEQ ID NO: 94; SEQ ID NO: 73 and SEQ ID NO: 95; SEQ ID NO: 73 and SEQ ID NO: 96; SEQ ID NO: 73 and SEQ ID NO: 97; SEQ ID NO: 73 and SEQ ID NO: 98; SEQ ID NO: 73 and SEQ ID NO: 99; SEQ ID NO: 73 and SEQ ID NO: 100; SEQ ID NO: 73 and SEQ ID NO: 101; SEQ ID NO: 73 and SEQ ID NO: 102; SEQ ID NO: 74 and SEQ ID NO: 75; SEQ ID NO: 74 and SEQ ID NO: 76; SEQ ID NO: 74 and SEQ ID NO: 77; SEQ ID NO: 74 and SEQ ID NO: 78; SEQ ID NO: 74 and SEQ ID NO: 84; SEQ ID NO: 74 and SEQ ID NO: 85; SEQ ID NO: 74 and SEQ ID NO: 86; SEQ ID NO: 74 and SEQ ID NO: 87; SEQ ID NO: 74 and SEQ ID NO: 88; SEQ ID NO: 74 and SEQ ID NO: 89; SEQ ID NO: 74 and SEQ ID NO: 90; SEQ ID NO: 74 and SEQ ID NO: 91; SEQ ID NO: 74 and SEQ ID NO: 92; SEQ ID NO: 74 and SEQ ID NO: 93; SEQ ID NO: 74 and SEQ ID NO: 94; SEQ ID NO: 74 and SEQ ID NO: 95; SEQ ID NO: 74 and SEQ ID NO: 96; SEQ ID NO: 74 and SEQ ID NO: 97; SEQ ID NO: 74 and SEQ ID NO: 98; SEQ ID NO: 74 and SEQ ID NO: 99; SEQ ID NO: 74 and SEQ ID NO: 100; SEQ ID NO: 74 and SEQ ID NO: 101; SEQ ID NO: 74 and SEQ ID NO: 102; SEQ ID NO: 75 and SEQ ID NO: 76; SEQ ID NO: 75 and SEQ ID NO: 77; SEQ ID NO: 75 and SEQ ID NO: 78; SEQ ID NO: 75 and SEQ ID NO: 84; SEQ ID NO: 75 and SEQ ID NO: 85; SEQ ID NO: 75 and SEQ ID NO: 86; SEQ ID NO: 75 and SEQ ID NO: 87; SEQ ID NO: 75 and SEQ ID NO: 88; SEQ ID NO: 75 and SEQ ID NO: 89; SEQ ID NO: 75 and SEQ ID NO: 90; SEQ ID NO: 75 and SEQ ID NO: 91; SEQ ID NO: 75 and SEQ ID NO: 92; SEQ ID NO: 75 and SEQ ID NO: 93; SEQ ID NO: 75 and SEQ ID NO: 94; SEQ ID NO: 75 and SEQ ID NO: 95; SEQ ID NO: 75 and SEQ ID NO: 96; SEQ ID NO: 75 and SEQ ID NO: 97; SEQ ID NO: 75 and SEQ ID NO: 98; SEQ ID NO: 75 and SEQ ID NO: 99; SEQ ID NO: 75 and SEQ ID NO: 100; SEQ ID NO: 75 and SEQ ID NO: 101; SEQ ID NO: 75 and SEQ ID NO: 102; SEQ ID NO: 76 and SEQ ID NO: 77; SEQ ID NO: 76 and SEQ ID NO: 78; SEQ ID NO: 76 and SEQ ID NO: 84; SEQ ID NO: 76 and SEQ ID NO: 85; SEQ ID NO: 76 and SEQ ID NO: 86; SEQ ID NO: 76 and SEQ ID NO: 87; SEQ ID NO: 76 and SEQ ID NO: 88; SEQ ID NO: 76 and SEQ ID NO: 89; SEQ ID NO: 76 and SEQ ID NO: 90; SEQ ID NO: 76 and SEQ ID NO: 91; SEQ ID NO: 76 and SEQ ID NO: 92; SEQ ID NO: 76 and SEQ ID NO: 93; SEQ ID NO: 76 and SEQ ID NO: 94; SEQ ID NO: 76 and SEQ ID NO: 95; SEQ ID NO: 76 and SEQ ID NO: 96; SEQ ID NO: 76 and SEQ ID NO: 97; SEQ ID NO: 76 and SEQ ID NO: 98; SEQ ID NO: 76 and SEQ ID NO: 99; SEQ ID NO: 76 and SEQ ID NO: 100; SEQ ID NO: 76 and SEQ ID NO: 101; SEQ ID NO: 76 and SEQ ID NO: 102; SEQ ID NO: 77 and SEQ ID NO: 78; SEQ ID NO: 77 and SEQ ID NO: 84; SEQ ID NO: 77 and SEQ ID NO: 85; SEQ ID NO: 77 and SEQ ID NO: 86; SEQ ID NO: 77 and SEQ ID NO: 87; SEQ ID NO: 77 and SEQ ID NO: 88; SEQ ID NO: 77 and SEQ ID NO: 89; SEQ ID NO: 77 and SEQ ID NO: 90; SEQ ID NO: 77 and SEQ ID NO: 91; SEQ ID NO: 77 and SEQ ID NO: 92; SEQ ID NO: 77 and SEQ ID NO: 93; SEQ ID NO: 77 and SEQ ID NO: 94; SEQ ID NO: 77 and SEQ ID NO: 95; SEQ ID NO: 77 and SEQ ID NO: 96; SEQ ID NO: 77 and SEQ ID NO: 97; SEQ ID NO: 77 and SEQ ID NO: 98; SEQ ID NO: 77 and SEQ ID NO: 99; SEQ ID NO: 77 and SEQ ID NO: 100; SEQ ID NO: 77 and SEQ ID NO: 101; SEQ ID NO: 77 and SEQ ID NO: 102; SEQ ID NO: 78 and SEQ ID NO: 84; SEQ ID NO: 78 and SEQ ID NO: 85; SEQ ID NO: 78 and SEQ ID NO: 86; SEQ ID NO: 78 and SEQ ID NO: 87; SEQ ID NO: 78 and SEQ ID NO: 88; SEQ ID NO: 78 and SEQ ID NO: 89; SEQ ID NO: 78 and SEQ ID NO: 90; SEQ ID NO: 78 and SEQ ID NO: 91; SEQ ID NO: 78 and SEQ ID NO: 92; SEQ ID NO: 78 and SEQ ID NO: 93; SEQ ID NO: 78 and SEQ ID NO: 94; SEQ ID NO: 78 and SEQ ID NO: 95; SEQ ID NO: 78 and SEQ ID NO: 96; SEQ ID NO: 78 and SEQ ID NO: 97; SEQ ID NO: 78 and SEQ ID NO: 98; SEQ ID NO: 78 and SEQ ID NO: 99; SEQ ID NO: 78 and SEQ ID NO: 100; SEQ ID NO: 78 and SEQ ID NO: 101; SEQ ID NO: 78 and SEQ ID NO: 102; SEQ ID NO: 84 and SEQ ID NO: 85; SEQ ID NO: 84 and SEQ ID NO: 86; SEQ ID NO: 84 and SEQ ID NO: 87; SEQ ID NO: 84 and SEQ ID NO: 88; SEQ ID NO: 84 and SEQ ID NO: 89; SEQ ID NO: 84 and SEQ ID NO: 90; SEQ ID NO: 84 and SEQ ID NO: 91; SEQ ID NO: 84 and SEQ ID NO: 92; SEQ ID NO: 84 and SEQ ID NO: 93; SEQ ID NO: 84 and SEQ ID NO: 94; SEQ ID NO: 84 and SEQ ID NO: 95; SEQ ID NO: 84 and SEQ ID NO: 96; SEQ ID NO: 84 and SEQ ID NO: 97; SEQ ID NO: 84 and SEQ ID NO: 98; SEQ ID NO: 84 and SEQ ID NO: 99; SEQ ID NO: 84 and SEQ ID NO: 100; SEQ ID NO: 84 and SEQ ID NO: 101; SEQ ID NO: 84 and SEQ ID NO: 102; SEQ ID NO: 85 and SEQ ID NO: 86; SEQ ID NO: 85 and SEQ ID NO: 87; SEQ ID NO: 85 and SEQ ID NO: 88; SEQ ID NO: 85 and SEQ ID NO: 89; SEQ ID NO: 85 and SEQ ID NO: 90; SEQ ID NO: 85 and SEQ ID NO: 91; SEQ ID NO: 85 and SEQ ID NO: 92; SEQ ID NO: 85 and SEQ ID NO: 93; SEQ ID NO: 85 and SEQ ID NO: 94; SEQ ID NO: 85 and SEQ ID NO: 95; SEQ ID NO: 85 and SEQ ID NO: 96; SEQ ID NO: 85 and SEQ ID NO: 97; SEQ ID NO: 85 and SEQ ID NO: 98; SEQ ID NO: 85 and SEQ ID NO: 99; SEQ ID NO: 85 and SEQ ID NO: 100; SEQ ID NO: 85 and SEQ ID NO: 101; SEQ ID NO: 85 and SEQ ID NO: 102; SEQ ID NO: 86 and SEQ ID NO: 87; SEQ ID NO: 86 and SEQ ID NO: 88; SEQ ID NO: 86 and SEQ ID NO: 89; SEQ ID NO: 86 and SEQ ID NO: 90; SEQ ID NO: 86 and SEQ ID NO: 91; SEQ ID NO: 86 and SEQ ID NO: 92; SEQ ID NO: 86 and SEQ ID NO: 93; SEQ ID NO: 86 and SEQ ID NO: 94; SEQ ID NO: 86 and SEQ ID NO: 95; SEQ ID NO: 86 and SEQ ID NO: 96; SEQ ID NO: 86 and SEQ ID NO: 97; SEQ ID NO: 86 and SEQ ID NO: 98; SEQ ID NO: 86 and SEQ ID NO: 99; SEQ ID NO: 86 and SEQ ID NO: 100; SEQ ID NO: 86 and SEQ ID NO: 101; SEQ ID NO: 86 and SEQ ID NO: 102; SEQ ID NO: 87 and SEQ ID NO: 88; SEQ ID NO: 87 and SEQ ID NO: 89; SEQ ID NO: 87 and SEQ ID NO: 90; SEQ ID NO: 87 and SEQ ID NO: 91; SEQ ID NO: 87 and SEQ ID NO: 92; SEQ ID NO: 87 and SEQ ID NO: 93; SEQ ID NO: 87 and SEQ ID NO: 94; SEQ ID NO: 87 and SEQ ID NO: 95; SEQ ID NO: 87 and SEQ ID NO: 96; SEQ ID NO: 87 and SEQ ID NO: 97; SEQ ID NO: 87 and SEQ ID NO: 98; SEQ ID NO: 87 and SEQ ID NO: 99; SEQ ID NO: 87 and SEQ ID NO: 100; SEQ ID NO: 87 and SEQ ID NO: 101; SEQ ID NO: 87 and SEQ ID NO: 102; SEQ ID NO: 88 and SEQ ID NO: 89; SEQ ID NO: 88 and SEQ ID NO: 90; SEQ ID NO: 88 and SEQ ID NO: 91; SEQ ID NO: 88 and SEQ ID NO: 92; SEQ ID NO: 88 and SEQ ID NO: 93; SEQ ID NO: 88 and SEQ ID NO: 94; SEQ ID NO: 88 and SEQ ID NO: 95; SEQ ID NO: 88 and SEQ ID NO: 96; SEQ ID NO: 88 and SEQ ID NO: 97; SEQ ID NO: 88 and SEQ ID NO: 98; SEQ ID NO: 88 and SEQ ID NO: 99; SEQ ID NO: 88 and SEQ ID NO: 100; SEQ ID NO: 88 and SEQ ID NO: 101; SEQ ID NO: 88 and SEQ ID NO: 102; SEQ ID NO: 89 and SEQ ID NO: 90; SEQ ID NO: 89 and SEQ ID NO: 91; SEQ ID NO: 89 and SEQ ID NO: 92; SEQ ID NO: 89 and SEQ ID NO: 93; SEQ ID NO: 89 and SEQ ID NO: 94; SEQ ID NO: 89 and SEQ ID NO: 95; SEQ ID NO: 89 and SEQ ID NO: 96; SEQ ID NO: 89 and SEQ ID NO: 97; SEQ ID NO: 89 and SEQ ID NO: 98; SEQ ID NO: 89 and SEQ ID NO: 99; SEQ ID NO: 89 and SEQ ID NO: 100; SEQ ID NO: 89 and SEQ ID NO: 101; SEQ ID NO: 89 and SEQ ID NO: 102; SEQ ID NO: 90 and SEQ ID NO: 91; SEQ ID NO: 90 and SEQ ID NO: 92; SEQ ID NO: 90 and SEQ ID NO: 93; SEQ ID NO: 90 and SEQ ID NO: 94; SEQ ID NO: 90 and SEQ ID NO: 95; SEQ ID NO: 90 and SEQ ID NO: 96; SEQ ID NO: 90 and SEQ ID NO: 97; SEQ ID NO: 90 and SEQ ID NO: 98; SEQ ID NO: 90 and SEQ ID NO: 99; SEQ ID NO: 90 and SEQ ID NO: 100; SEQ ID NO: 90 and SEQ ID NO: 101; SEQ ID NO: 90 and SEQ ID NO: 102; SEQ ID NO: 91 and SEQ ID NO: 92; SEQ ID NO: 91 and SEQ ID NO: 93; SEQ ID NO: 91 and SEQ ID NO: 94; SEQ ID NO: 91 and SEQ ID NO: 95; SEQ ID NO: 91 and SEQ ID NO: 96; SEQ ID NO: 91 and SEQ ID NO: 97; SEQ ID NO: 91 and SEQ ID NO: 98; SEQ ID NO: 91 and SEQ ID NO: 99; SEQ ID NO: 91 and SEQ ID NO: 100; SEQ ID NO: 91 and SEQ ID NO: 101; SEQ ID NO: 91 and SEQ ID NO: 102; SEQ ID NO: 92 and SEQ ID NO: 93; SEQ ID NO: 92 and SEQ ID NO: 94; SEQ ID NO: 92 and SEQ ID NO: 95; SEQ ID NO: 92 and SEQ ID NO: 96; SEQ ID NO: 92 and SEQ ID NO: 97; SEQ ID NO: 92 and SEQ ID NO: 98; SEQ ID NO: 92 and SEQ ID NO: 99; SEQ ID NO: 92 and SEQ ID NO: 100; SEQ ID NO: 92 and SEQ ID NO: 101; SEQ ID NO: 92 and SEQ ID NO: 102; SEQ ID NO: 93 and SEQ ID NO: 94; SEQ ID NO: 93 and SEQ ID NO: 95; SEQ ID NO: 93 and SEQ ID NO: 96; SEQ ID NO: 93 and SEQ ID NO: 97; SEQ ID NO: 93 and SEQ ID NO: 98; SEQ ID NO: 93 and SEQ ID NO: 99; SEQ ID NO: 93 and SEQ ID NO: 100; SEQ ID NO: 93 and SEQ ID NO: 101; SEQ ID NO: 93 and SEQ ID NO: 102; SEQ ID NO: 94 and SEQ ID NO: 95; SEQ ID NO: 94 and SEQ ID NO: 96; SEQ ID NO: 94 and SEQ ID NO: 97; SEQ ID NO: 94 and SEQ ID NO: 98; SEQ ID NO: 94 and SEQ ID NO: 99; SEQ ID NO: 94 and SEQ ID NO: 100; SEQ ID NO: 94 and SEQ ID NO: 101; SEQ ID NO: 94 and SEQ ID NO: 102; SEQ ID NO: 95 and SEQ ID NO: 96; SEQ ID NO: 95 and SEQ ID NO: 97; SEQ ID NO: 95 and SEQ ID NO: 98; SEQ ID NO: 95 and SEQ ID NO: 99; SEQ ID NO: 95 and SEQ ID NO: 100; SEQ ID NO: 95 and SEQ ID NO: 101; SEQ ID NO: 95 and SEQ ID NO: 102; SEQ ID NO: 96 and SEQ ID NO: 97; SEQ ID NO: 96 and SEQ ID NO: 98; SEQ ID NO: 96 and SEQ ID NO: 99; SEQ ID NO: 96 and SEQ ID NO: 100; SEQ ID NO: 96 and SEQ ID NO: 101; SEQ ID NO: 96 and SEQ ID NO: 102; SEQ ID NO: 97 and SEQ ID NO: 98; SEQ ID NO: 97 and SEQ ID NO: 99; SEQ ID NO: 97 and SEQ ID NO: 100; SEQ ID NO: 97 and SEQ ID NO: 101; SEQ ID NO: 97 and SEQ ID NO: 102; SEQ ID NO: 98 and SEQ ID NO: 99; SEQ ID NO: 98 and SEQ ID NO: 100; SEQ ID NO: 98 and SEQ ID NO: 101; SEQ ID NO: 98 and SEQ ID NO: 102; SEQ ID NO: 99 and SEQ ID NO: 100; SEQ ID NO: 99 and SEQ ID NO: 101; SEQ ID NO: 99 and SEQ ID NO: 102; SEQ ID NO: 100 and SEQ ID NO: 101; SEQ ID NO: 100 and SEQ ID NO: 102; SEQ ID NO: 101 and SEQ ID NO: 102; SEQ ID NO: 200 and SEQ ID NO: 201; SEQ ID NO: 200 and SEQ ID NO: 202; SEQ ID NO: 200 and SEQ ID NO: 203; SEQ ID NO: 200 and SEQ ID NO: 204; SEQ ID NO: 200 and SEQ ID NO: 205; SEQ ID NO: 200 and SEQ ID NO: 206; SEQ ID NO: 200 and SEQ ID NO: 207; SEQ ID NO: 200 and SEQ ID NO: 208; SEQ ID NO: 201 and SEQ ID NO: 202; SEQ ID NO: 201 and SEQ ID NO: 203; SEQ ID NO: 201 and SEQ ID NO: 204; SEQ ID NO: 201 and SEQ ID NO: 205; SEQ ID NO: 201 and SEQ ID NO: 206; SEQ ID NO: 201 and SEQ ID NO: 207; SEQ ID NO: 201 and SEQ ID NO: 208; SEQ ID NO: 202 and SEQ ID NO: 203; SEQ ID NO: 202 and SEQ ID NO: 204; SEQ ID NO: 202 and SEQ ID NO: 205; SEQ ID NO: 202 and SEQ ID NO: 206; SEQ ID NO: 202 and SEQ ID NO: 207; SEQ ID NO: 202 and SEQ ID NO: 208; SEQ ID NO: 203 and SEQ ID NO: 204; SEQ ID NO: 203 and SEQ ID NO: 205; SEQ ID NO: 203 and SEQ ID NO: 206; SEQ ID NO: 203 and SEQ ID NO: 207; SEQ ID NO: 203 and SEQ ID NO: 208; SEQ ID NO: 204 and SEQ ID NO: 205; SEQ ID NO: 204 and SEQ ID NO: 206; SEQ ID NO: 204 and SEQ ID NO: 207; SEQ ID NO: 204 and SEQ ID NO: 208; SEQ ID NO: 205 and SEQ ID NO: 206; SEQ ID NO: 205 and SEQ ID NO: 207; SEQ ID NO: 205 and SEQ ID NO: 208; SEQ ID NO: 206 and SEQ ID NO: 207; SEQ ID NO: 206 and SEQ ID NO: 208; SEQ ID NO: 207 and SEQ ID NO: 208; SEQ ID NO: 209 and SEQ ID NO: 210; SEQ ID NO: 209 and SEQ ID NO: 211; SEQ ID NO: 209 and SEQ ID NO: 212; SEQ ID NO: 209 and SEQ ID NO: 213; SEQ ID NO: 209 and SEQ ID NO: 214; SEQ ID NO: 209 and SEQ ID NO: 215; SEQ ID NO: 209 and SEQ ID NO: 216; SEQ ID NO: 209 and SEQ ID NO: 217; SEQ ID NO: 209 and SEQ ID NO: 218; SEQ ID NO: 209 and SEQ ID NO: 219; SEQ ID NO: 209 and SEQ ID NO: 220; SEQ ID NO: 209 and SEQ ID NO: 221; SEQ ID NO: 209 and SEQ ID NO: 222; SEQ ID NO: 209 and SEQ ID NO: 223; SEQ ID NO: 209 and SEQ ID NO: 224; SEQ ID NO: 209 and SEQ ID NO: 225; SEQ ID NO: 209 and SEQ ID NO: 226; SEQ ID NO: 209 and SEQ ID NO: 227; SEQ ID NO: 209 and SEQ ID NO: 228; SEQ ID NO: 209 and SEQ ID NO: 229; SEQ ID NO: 209 and SEQ ID NO: 230; SEQ ID NO: 210 and SEQ ID NO: 211; SEQ ID NO: 210 and SEQ ID NO: 212; SEQ ID NO: 210 and SEQ ID NO: 213; SEQ ID NO: 210 and SEQ ID NO: 214; SEQ ID NO: 210 and SEQ ID NO: 215; SEQ ID NO: 210 and SEQ ID NO: 216; SEQ ID NO: 210 and SEQ ID NO: 217; SEQ ID NO: 210 and SEQ ID NO: 218; SEQ ID NO: 210 and SEQ ID NO: 219; SEQ ID NO: 210 and SEQ ID NO: 220; SEQ ID NO: 210 and SEQ ID NO: 221; SEQ ID NO: 210 and SEQ ID NO: 222; SEQ ID NO: 210 and SEQ ID NO: 223; SEQ ID NO: 210 and SEQ ID NO: 224; SEQ ID NO: 210 and SEQ ID NO: 225; SEQ ID NO: 210 and SEQ ID NO: 226; SEQ ID NO: 210 and SEQ ID NO: 227; SEQ ID NO: 210 and SEQ ID NO: 228; SEQ ID NO: 210 and SEQ ID NO: 229; SEQ ID NO: 210 and SEQ ID NO: 230; SEQ ID NO: 211 and SEQ ID NO: 212; SEQ ID NO: 211 and SEQ ID NO: 213; SEQ ID NO: 211 and SEQ ID NO: 214; SEQ ID NO: 211 and SEQ ID NO: 215; SEQ ID NO: 211 and SEQ ID NO: 216; SEQ ID NO: 211 and SEQ ID NO: 217; SEQ ID NO: 211 and SEQ ID NO: 218; SEQ ID NO: 211 and SEQ ID NO: 219; SEQ ID NO: 211 and SEQ ID NO: 220; SEQ ID NO: 211 and SEQ ID NO: 221; SEQ ID NO: 211 and SEQ ID NO: 222; SEQ ID NO: 211 and SEQ ID NO: 223; SEQ ID NO: 211 and SEQ ID NO: 224; SEQ ID NO: 211 and SEQ ID NO: 225; SEQ ID NO: 211 and SEQ ID NO: 226; SEQ ID NO: 211 and SEQ ID NO: 227; SEQ ID NO: 211 and SEQ ID NO: 228; SEQ ID NO: 211 and SEQ ID NO: 229; SEQ ID NO: 211 and SEQ ID NO: 230; SEQ ID NO: 212 and SEQ ID NO: 213; SEQ ID NO: 212 and SEQ ID NO: 214; SEQ ID NO: 212 and SEQ ID NO: 215; SEQ ID NO: 212 and SEQ ID NO: 216; SEQ ID NO: 212 and SEQ ID NO: 217; SEQ ID NO: 212 and SEQ ID NO: 218; SEQ ID NO: 212 and SEQ ID NO: 219; SEQ ID NO: 212 and SEQ ID NO: 220; SEQ ID NO: 212 and SEQ ID NO: 221; SEQ ID NO: 212 and SEQ ID NO: 222; SEQ ID NO: 212 and SEQ ID NO: 223; SEQ ID NO: 212 and SEQ ID NO: 224; SEQ ID NO: 212 and SEQ ID NO: 225; SEQ ID NO: 212 and SEQ ID NO: 226; SEQ ID NO: 212 and SEQ ID NO: 227; SEQ ID NO: 212 and SEQ ID NO: 228; SEQ ID NO: 212 and SEQ ID NO: 229; SEQ ID NO: 212 and SEQ ID NO: 230; SEQ ID NO: 213 and SEQ ID NO: 214; SEQ ID NO: 213 and SEQ ID NO: 215; SEQ ID NO: 213 and SEQ ID NO: 216; SEQ ID NO: 213 and SEQ ID NO: 217; SEQ ID NO: 213 and SEQ ID NO: 218; SEQ ID NO: 213 and SEQ ID NO: 219; SEQ ID NO: 213 and SEQ ID NO: 220; SEQ ID NO: 213 and SEQ ID NO: 221; SEQ ID NO: 213 and SEQ ID NO: 222; SEQ ID NO: 213 and SEQ ID NO: 223; SEQ ID NO: 213 and SEQ ID NO: 224; SEQ ID NO: 213 and SEQ ID NO: 225; SEQ ID NO: 213 and SEQ ID NO: 226; SEQ ID NO: 213 and SEQ ID NO: 227; SEQ ID NO: 213 and SEQ ID NO: 228; SEQ ID NO: 213 and SEQ ID NO: 229; SEQ ID NO: 213 and SEQ ID NO: 230; SEQ ID NO: 214 and SEQ ID NO: 215; SEQ ID NO: 214 and SEQ ID NO: 216; SEQ ID NO: 214 and SEQ ID NO: 217; SEQ ID NO: 214 and SEQ ID NO: 218; SEQ ID NO: 214 and SEQ ID NO: 219; SEQ ID NO: 214 and SEQ ID NO: 220; SEQ ID NO: 214 and SEQ ID NO: 221; SEQ ID NO: 214 and SEQ ID NO: 222; SEQ ID NO: 214 and SEQ ID NO: 223; SEQ ID NO: 214 and SEQ ID NO: 224; SEQ ID NO: 214 and SEQ ID NO: 225; SEQ ID NO: 214 and SEQ ID NO: 226; SEQ ID NO: 214 and SEQ ID NO: 227; SEQ ID NO: 214 and SEQ ID NO: 228; SEQ ID NO: 214 and SEQ ID NO: 229; SEQ ID NO: 214 and SEQ ID NO: 230; SEQ ID NO: 215 and SEQ ID NO: 216; SEQ ID NO: 215 and SEQ ID NO: 217; SEQ ID NO: 215 and SEQ ID NO: 218; SEQ ID NO: 215 and SEQ ID NO: 219; SEQ ID NO: 215 and SEQ ID NO: 220; SEQ ID NO: 215 and SEQ ID NO: 221; SEQ ID NO: 215 and SEQ ID NO: 222; SEQ ID NO: 215 and SEQ ID NO: 223; SEQ ID NO: 215 and SEQ ID NO: 224; SEQ ID NO: 215 and SEQ ID NO: 225; SEQ ID NO: 215 and SEQ ID NO: 226; SEQ ID NO: 215 and SEQ ID NO: 227; SEQ ID NO: 215 and SEQ ID NO: 228; SEQ ID NO: 215 and SEQ ID NO: 229; SEQ ID NO: 215 and SEQ ID NO: 230; SEQ ID NO: 216 and SEQ ID NO: 217; SEQ ID NO: 216 and SEQ ID NO: 218; SEQ ID NO: 216 and SEQ ID NO: 219; SEQ ID NO: 216 and SEQ ID NO: 220; SEQ ID NO: 216 and SEQ ID NO: 221; SEQ ID NO: 216 and SEQ ID NO: 222; SEQ ID NO: 216 and SEQ ID NO: 223; SEQ ID NO: 216 and SEQ ID NO: 224; SEQ ID NO: 216 and SEQ ID NO: 225; SEQ ID NO: 216 and SEQ ID NO: 226; SEQ ID NO: 216 and SEQ ID NO: 227; SEQ ID NO: 216 and SEQ ID NO: 228; SEQ ID NO: 216 and SEQ ID NO: 229; SEQ ID NO: 216 and SEQ ID NO: 230; SEQ ID NO: 217 and SEQ ID NO: 218; SEQ ID NO: 217 and SEQ ID NO: 219; SEQ ID NO: 217 and SEQ ID NO: 220; SEQ ID NO: 217 and SEQ ID NO: 221; SEQ ID NO: 217 and SEQ ID NO: 222; SEQ ID NO: 217 and SEQ ID NO: 223; SEQ ID NO: 217 and SEQ ID NO: 224; SEQ ID NO: 217 and SEQ ID NO: 225; SEQ ID NO: 217 and SEQ ID NO: 226; SEQ ID NO: 217 and SEQ ID NO: 227; SEQ ID NO: 217 and SEQ ID NO: 228; SEQ ID NO: 217 and SEQ ID NO: 229; SEQ ID NO: 217 and SEQ ID NO: 230; SEQ ID NO: 218 and SEQ ID NO: 219; SEQ ID NO: 218 and SEQ ID NO: 220; SEQ ID NO: 218 and SEQ ID NO: 221; SEQ ID NO: 218 and SEQ ID NO: 222; SEQ ID NO: 218 and SEQ ID NO: 223; SEQ ID NO: 218 and SEQ ID NO: 224; SEQ ID NO: 218 and SEQ ID NO: 225; SEQ ID NO: 218 and SEQ ID NO: 226; SEQ ID NO: 218 and SEQ ID NO: 227; SEQ ID NO: 218 and SEQ ID NO: 228; SEQ ID NO: 218 and SEQ ID NO: 229; SEQ ID NO: 218 and SEQ ID NO: 230; SEQ ID NO: 219 and SEQ ID NO: 220; SEQ ID NO: 219 and SEQ ID NO: 221; SEQ ID NO: 219 and SEQ ID NO: 222; SEQ ID NO: 219 and SEQ ID NO: 223; SEQ ID NO: 219 and SEQ ID NO: 224; SEQ ID NO: 219 and SEQ ID NO: 225; SEQ ID NO: 219 and SEQ ID NO: 226; SEQ ID NO: 219 and SEQ ID NO: 227; SEQ ID NO: 219 and SEQ ID NO: 228; SEQ ID NO: 219 and SEQ ID NO: 229; SEQ ID NO: 219 and SEQ ID NO: 230; SEQ ID NO: 220 and SEQ ID NO: 221; SEQ ID NO: 220 and SEQ ID NO: 222; SEQ ID NO: 220 and SEQ ID NO: 223; SEQ ID NO: 220 and SEQ ID NO: 224; SEQ ID NO: 220 and SEQ ID NO: 225; SEQ ID NO: 220 and SEQ ID NO: 226; SEQ ID NO: 220 and SEQ ID NO: 227; SEQ ID NO: 220 and SEQ ID NO: 228; SEQ ID NO: 220 and SEQ ID NO: 229; SEQ ID NO: 220 and SEQ ID NO: 230; SEQ ID NO: 221 and SEQ ID NO: 222; SEQ ID NO: 221 and SEQ ID NO: 223; SEQ ID NO: 221 and SEQ ID NO: 224; SEQ ID NO: 221 and SEQ ID NO: 225; SEQ ID NO: 221 and SEQ ID NO: 226; SEQ ID NO: 221 and SEQ ID NO: 227; SEQ ID NO: 221 and SEQ ID NO: 228; SEQ ID NO: 221 and SEQ ID NO: 229; SEQ ID NO: 221 and SEQ ID NO: 230; SEQ ID NO: 222 and SEQ ID NO: 223; SEQ ID NO: 222 and SEQ ID NO: 224; SEQ ID NO: 222 and SEQ ID NO: 225; SEQ ID NO: 222 and SEQ ID NO: 226; SEQ ID NO: 222 and SEQ ID NO: 227; SEQ ID NO: 222 and SEQ ID NO: 228; SEQ ID NO: 222 and SEQ ID NO: 229; SEQ ID NO: 222 and SEQ ID NO: 230; SEQ ID NO: 223 and SEQ ID NO: 224; SEQ ID NO: 223 and SEQ ID NO: 225; SEQ ID NO: 223 and SEQ ID NO: 226; SEQ ID NO: 223 and SEQ ID NO: 227; SEQ ID NO: 223 and SEQ ID NO: 228; SEQ ID NO: 223 and SEQ ID NO: 229; SEQ ID NO: 223 and SEQ ID NO: 230; SEQ ID NO: 224 and SEQ ID NO: 225; SEQ ID NO: 224 and SEQ ID NO: 226; SEQ ID NO: 224 and SEQ ID NO: 227; SEQ ID NO: 224 and SEQ ID NO: 228; SEQ ID NO: 224 and SEQ ID NO: 229; SEQ ID NO: 224 and SEQ ID NO: 230; SEQ ID NO: 225 and SEQ ID NO: 226; SEQ ID NO: 225 and SEQ ID NO: 227; SEQ ID NO: 225 and SEQ ID NO: 228; SEQ ID NO: 225 and SEQ ID NO: 229; SEQ ID NO: 225 and SEQ ID NO: 230; SEQ ID NO: 226 and SEQ ID NO: 227; SEQ ID NO: 226 and SEQ ID NO: 228; SEQ ID NO: 226 and SEQ ID NO: 229; SEQ ID NO: 226 and SEQ ID NO: 230; SEQ ID NO: 227 and SEQ ID NO: 228; SEQ ID NO: 227 and SEQ ID NO: 229; SEQ ID NO: 227 and SEQ ID NO: 230; SEQ ID NO: 228 and SEQ ID NO: 229; SEQ ID NO: 228 and SEQ ID NO: 230; SEQ ID NO: 229 and SEQ ID NO: 230; SEQ ID NO: 231 and SEQ ID NO: 232; SEQ ID NO: 231 and SEQ ID NO: 233; SEQ ID NO: 231 and SEQ ID NO: 234; SEQ ID NO: 231 and SEQ ID NO: 235; SEQ ID NO: 231 and SEQ ID NO: 236; SEQ ID NO: 231 and SEQ ID NO: 237; SEQ ID NO: 231 and SEQ ID NO: 238; SEQ ID NO: 231 and SEQ ID NO: 239; SEQ ID NO: 231 and SEQ ID NO: 240; SEQ ID NO: 231 and SEQ ID NO: 241; SEQ ID NO: 231 and SEQ ID NO: 242; SEQ ID NO: 232 and SEQ ID NO: 233; SEQ ID NO: 232 and SEQ ID NO: 234; SEQ ID NO: 232 and SEQ ID NO: 235; SEQ ID NO: 232 and SEQ ID NO: 236; SEQ ID NO: 232 and SEQ ID NO: 237; SEQ ID NO: 232 and SEQ ID NO: 238; SEQ ID NO: 232 and SEQ ID NO: 239; SEQ ID NO: 232 and SEQ ID NO: 240; SEQ ID NO: 232 and SEQ ID NO: 241; SEQ ID NO: 232 and SEQ ID NO: 242; SEQ ID NO: 233 and SEQ ID NO: 234; SEQ ID NO: 233 and SEQ ID NO: 235; SEQ ID NO: 233 and SEQ ID NO: 236; SEQ ID NO: 233 and SEQ ID NO: 237; SEQ ID NO: 233 and SEQ ID NO: 238; SEQ ID NO: 233 and SEQ ID NO: 239; SEQ ID NO: 233 and SEQ ID NO: 240; SEQ ID NO: 233 and SEQ ID NO: 241; SEQ ID NO: 233 and SEQ ID NO: 242; SEQ ID NO: 234 and SEQ ID NO: 235; SEQ ID NO: 234 and SEQ ID NO: 236; SEQ ID NO: 234 and SEQ ID NO: 237; SEQ ID NO: 234 and SEQ ID NO: 238; SEQ ID NO: 234 and SEQ ID NO: 239; SEQ ID NO: 234 and SEQ ID NO: 240; SEQ ID NO: 234 and SEQ ID NO: 241; SEQ ID NO: 234 and SEQ ID NO: 242; SEQ ID NO: 235 and SEQ ID NO: 236; SEQ ID NO: 235 and SEQ ID NO: 237; SEQ ID NO: 235 and SEQ ID NO: 238; SEQ ID NO: 235 and SEQ ID NO: 239; SEQ ID NO: 235 and SEQ ID NO: 240; SEQ ID NO: 235 and SEQ ID NO: 241; SEQ ID NO: 235 and SEQ ID NO: 242; SEQ ID NO: 236 and SEQ ID NO: 237; SEQ ID NO: 236 and SEQ ID NO: 238; SEQ ID NO: 236 and SEQ ID NO: 239; SEQ ID NO: 236 and SEQ ID NO: 240; SEQ ID NO: 236 and SEQ ID NO: 241; SEQ ID NO: 236 and SEQ ID NO: 242; SEQ ID NO: 237 and SEQ ID NO: 238; SEQ ID NO: 237 and SEQ ID NO: 239; SEQ ID NO: 237 and SEQ ID NO: 240; SEQ ID NO: 237 and SEQ ID NO: 241; SEQ ID NO: 237 and SEQ ID NO: 242; SEQ ID NO: 238 and SEQ ID NO: 239; SEQ ID NO: 238 and SEQ ID NO: 240; SEQ ID NO: 238 and SEQ ID NO: 241; SEQ ID NO: 238 and SEQ ID NO: 242; SEQ ID NO: 239 and SEQ ID NO: 240; SEQ ID NO: 239 and SEQ ID NO: 241; SEQ ID NO: 239 and SEQ ID NO: 242; SEQ ID NO: 240 and SEQ ID NO: 241; SEQ ID NO: 240 and SEQ ID NO: 242; SEQ ID NO: 241 and SEQ ID NO: 242; SEQ ID NO: 243 and SEQ ID NO: 244; SEQ ID NO: 243 and SEQ ID NO: 245; SEQ ID NO: 243 and SEQ ID NO: 246; SEQ ID NO: 243 and SEQ ID NO: 247; SEQ ID NO: 243 and SEQ ID NO: 248; SEQ ID NO: 243 and SEQ ID NO: 249; SEQ ID NO: 243 and SEQ ID NO: 250; SEQ ID NO: 243 and SEQ ID NO: 251; SEQ ID NO: 243 and SEQ ID NO: 252; SEQ ID NO: 243 and SEQ ID NO: 253; SEQ ID NO: 243 and SEQ ID NO: 254; SEQ ID NO: 243 and SEQ ID NO: 255; SEQ ID NO: 243 and SEQ ID NO: 256; SEQ ID NO: 243 and SEQ ID NO: 257; SEQ ID NO: 243 and SEQ ID NO: 258; SEQ ID NO: 243 and SEQ ID NO: 259; SEQ ID NO: 243 and SEQ ID NO: 260; SEQ ID NO: 243 and SEQ ID NO: 261; SEQ ID NO: 243 and SEQ ID NO: 262; SEQ ID NO: 243 and SEQ ID NO: 263; SEQ ID NO: 243 and SEQ ID NO: 264; SEQ ID NO: 243 and SEQ ID NO: 265; SEQ ID NO: 243 and SEQ ID NO: 266; SEQ ID NO: 243 and SEQ ID NO: 267; SEQ ID NO: 243 and SEQ ID NO: 268; SEQ ID NO: 243 and SEQ ID NO: 269; SEQ ID NO: 244 and SEQ ID NO: 245; SEQ ID NO: 244 and SEQ ID NO: 246; SEQ ID NO: 244 and SEQ ID NO: 247; SEQ ID NO: 244 and SEQ ID NO: 248; SEQ ID NO: 244 and SEQ ID NO: 249; SEQ ID NO: 244 and SEQ ID NO: 250; SEQ ID NO: 244 and SEQ ID NO: 251; SEQ ID NO: 244 and SEQ ID NO: 252; SEQ ID NO: 244 and SEQ ID NO: 253; SEQ ID NO: 244 and SEQ ID NO: 254; SEQ ID NO: 244 and SEQ ID NO: 255; SEQ ID NO: 244 and SEQ ID NO: 256; SEQ ID NO: 244 and SEQ ID NO: 257; SEQ ID NO: 244 and SEQ ID NO: 258; SEQ ID NO: 244 and SEQ ID NO: 259; SEQ ID NO: 244 and SEQ ID NO: 260; SEQ ID NO: 244 and SEQ ID NO: 261; SEQ ID NO: 244 and SEQ ID NO: 262; SEQ ID NO: 244 and SEQ ID NO: 263; SEQ ID NO: 244 and SEQ ID NO: 264; SEQ ID NO: 244 and SEQ ID NO: 265; SEQ ID NO: 244 and SEQ ID NO: 266; SEQ ID NO: 244 and SEQ ID NO: 267; SEQ ID NO: 244 and SEQ ID NO: 268; SEQ ID NO: 244 and SEQ ID NO: 269; SEQ ID NO: 245 and SEQ ID NO: 246; SEQ ID NO: 245 and SEQ ID NO: 247; SEQ ID NO: 245 and SEQ ID NO: 248; SEQ ID NO: 245 and SEQ ID NO: 249; SEQ ID NO: 245 and SEQ ID NO: 250; SEQ ID NO: 245 and SEQ ID NO: 251; SEQ ID NO: 245 and SEQ ID NO: 252; SEQ ID NO: 245 and SEQ ID NO: 253; SEQ ID NO: 245 and SEQ ID NO: 254; SEQ ID NO: 245 and SEQ ID NO: 255; SEQ ID NO: 245 and SEQ ID NO: 256; SEQ ID NO: 245 and SEQ ID NO: 257; SEQ ID NO: 245 and SEQ ID NO: 258; SEQ ID NO: 245 and SEQ ID NO: 259; SEQ ID NO: 245 and SEQ ID NO: 260; SEQ ID NO: 245 and SEQ ID NO: 261; SEQ ID NO: 245 and SEQ ID NO: 262; SEQ ID NO: 245 and SEQ ID NO: 263; SEQ ID NO: 245 and SEQ ID NO: 264; SEQ ID NO: 245 and SEQ ID NO: 265; SEQ ID NO: 245 and SEQ ID NO: 266; SEQ ID NO: 245 and SEQ ID NO: 267; SEQ ID NO: 245 and SEQ ID NO: 268; SEQ ID NO: 245 and SEQ ID NO: 269; SEQ ID NO: 246 and SEQ ID NO: 247; SEQ ID NO: 246 and SEQ ID NO: 248; SEQ ID NO: 246 and SEQ ID NO: 249; SEQ ID NO: 246 and SEQ ID NO: 250; SEQ ID NO: 246 and SEQ ID NO: 251; SEQ ID NO: 246 and SEQ ID NO: 252; SEQ ID NO: 246 and SEQ ID NO: 253; SEQ ID NO: 246 and SEQ ID NO: 254; SEQ ID NO: 246 and SEQ ID NO: 255; SEQ ID NO: 246 and SEQ ID NO: 256; SEQ ID NO: 246 and SEQ ID NO: 257; SEQ ID NO: 246 and SEQ ID NO: 258; SEQ ID NO: 246 and SEQ ID NO: 259; SEQ ID NO: 246 and SEQ ID NO: 260; SEQ ID NO: 246 and SEQ ID NO: 261; SEQ ID NO: 246 and SEQ ID NO: 262; SEQ ID NO: 246 and SEQ ID NO: 263; SEQ ID NO: 246 and SEQ ID NO: 264; SEQ ID NO: 246 and SEQ ID NO: 265; SEQ ID NO: 246 and SEQ ID NO: 266; SEQ ID NO: 246 and SEQ ID NO: 267; SEQ ID NO: 246 and SEQ ID NO: 268; SEQ ID NO: 246 and SEQ ID NO: 269; SEQ ID NO: 247 and SEQ ID NO: 248; SEQ ID NO: 247 and SEQ ID NO: 249; SEQ ID NO: 247 and SEQ ID NO: 250; SEQ ID NO: 247 and SEQ ID NO: 251; SEQ ID NO: 247 and SEQ ID NO: 252; SEQ ID NO: 247 and SEQ ID NO: 253; SEQ ID NO: 247 and SEQ ID NO: 254; SEQ ID NO: 247 and SEQ ID NO: 255; SEQ ID NO: 247 and SEQ ID NO: 256; SEQ ID NO: 247 and SEQ ID NO: 257; SEQ ID NO: 247 and SEQ ID NO: 258; SEQ ID NO: 247 and SEQ ID NO: 259; SEQ ID NO: 247 and SEQ ID NO: 260; SEQ ID NO: 247 and SEQ ID NO: 261; SEQ ID NO: 247 and SEQ ID NO: 262; SEQ ID NO: 247 and SEQ ID NO: 263; SEQ ID NO: 247 and SEQ ID NO: 264; SEQ ID NO: 247 and SEQ ID NO: 265; SEQ ID NO: 247 and SEQ ID NO: 266; SEQ ID NO: 247 and SEQ ID NO: 267; SEQ ID NO: 247 and SEQ ID NO: 268; SEQ ID NO: 247 and SEQ ID NO: 269; SEQ ID NO: 248 and SEQ ID NO: 249; SEQ ID NO: 248 and SEQ ID NO: 250; SEQ ID NO: 248 and SEQ ID NO: 251; SEQ ID NO: 248 and SEQ ID NO: 252; SEQ ID NO: 248 and SEQ ID NO: 253; SEQ ID NO: 248 and SEQ ID NO: 254; SEQ ID NO: 248 and SEQ ID NO: 255; SEQ ID NO: 248 and SEQ ID NO: 256; SEQ ID NO: 248 and SEQ ID NO: 257; SEQ ID NO: 248 and SEQ ID NO: 258; SEQ ID NO: 248 and SEQ ID NO: 259; SEQ ID NO: 248 and SEQ ID NO: 260; SEQ ID NO: 248 and SEQ ID NO: 261; SEQ ID NO: 248 and SEQ ID NO: 262; SEQ ID NO: 248 and SEQ ID NO: 263; SEQ ID NO: 248 and SEQ ID NO: 264; SEQ ID NO: 248 and SEQ ID NO: 265; SEQ ID NO: 248 and SEQ ID NO: 266; SEQ ID NO: 248 and SEQ ID NO: 267; SEQ ID NO: 248 and SEQ ID NO: 268; SEQ ID NO: 248 and SEQ ID NO: 269; SEQ ID NO: 249 and SEQ ID NO: 250; SEQ ID NO: 249 and SEQ ID NO: 251; SEQ ID NO: 249 and SEQ ID NO: 252; SEQ ID NO: 249 and SEQ ID NO: 253; SEQ ID NO: 249 and SEQ ID NO: 254; SEQ ID NO: 249 and SEQ ID NO: 255; SEQ ID NO: 249 and SEQ ID NO: 256; SEQ ID NO: 249 and SEQ ID NO: 257; SEQ ID NO: 249 and SEQ ID NO: 258; SEQ ID NO: 249 and SEQ ID NO: 259; SEQ ID NO: 249 and SEQ ID NO: 260; SEQ ID NO: 249 and SEQ ID NO: 261; SEQ ID NO: 249 and SEQ ID NO: 262; SEQ ID NO: 249 and SEQ ID NO: 263; SEQ ID NO: 249 and SEQ ID NO: 264; SEQ ID NO: 249 and SEQ ID NO: 265; SEQ ID NO: 249 and SEQ ID NO: 266; SEQ ID NO: 249 and SEQ ID NO: 267; SEQ ID NO: 249 and SEQ ID NO: 268; SEQ ID NO: 249 and SEQ ID NO: 269; SEQ ID NO: 250 and SEQ ID NO: 251; SEQ ID NO: 250 and SEQ ID NO: 252; SEQ ID NO: 250 and SEQ ID NO: 253; SEQ ID NO: 250 and SEQ ID NO: 254; SEQ ID NO: 250 and SEQ ID NO: 255; SEQ ID NO: 250 and SEQ ID NO: 256; SEQ ID NO: 250 and SEQ ID NO: 257; SEQ ID NO: 250 and SEQ ID NO: 258; SEQ ID NO: 250 and SEQ ID NO: 259; SEQ ID NO: 250 and SEQ ID NO: 260; SEQ ID NO: 250 and SEQ ID NO: 261; SEQ ID NO: 250 and SEQ ID NO: 262; SEQ ID NO: 250 and SEQ ID NO: 263; SEQ ID NO: 250 and SEQ ID NO: 264; SEQ ID NO: 250 and SEQ ID NO: 265; SEQ ID NO: 250 and SEQ ID NO: 266; SEQ ID NO: 250 and SEQ ID NO: 267; SEQ ID NO: 250 and SEQ ID NO: 268; SEQ ID NO: 250 and SEQ ID NO: 269; SEQ ID NO: 251 and SEQ ID NO: 252; SEQ ID NO: 251 and SEQ ID NO: 253; SEQ ID NO: 251 and SEQ ID NO: 254; SEQ ID NO: 251 and SEQ ID NO: 255; SEQ ID NO: 251 and SEQ ID NO: 256; SEQ ID NO: 251 and SEQ ID NO: 257; SEQ ID NO: 251 and SEQ ID NO: 258; SEQ ID NO: 251 and SEQ ID NO: 259; SEQ ID NO: 251 and SEQ ID NO: 260; SEQ ID NO: 251 and SEQ ID NO: 261; SEQ ID NO: 251 and SEQ ID NO: 262; SEQ ID NO: 251 and SEQ ID NO: 263; SEQ ID NO: 251 and SEQ ID NO: 264; SEQ ID NO: 251 and SEQ ID NO: 265; SEQ ID NO: 251 and SEQ ID NO: 266; SEQ ID NO: 251 and SEQ ID NO: 267; SEQ ID NO: 251 and SEQ ID NO: 268; SEQ ID NO: 251 and SEQ ID NO: 269; SEQ ID NO: 252 and SEQ ID NO: 253; SEQ ID NO: 252 and SEQ ID NO: 254; SEQ ID NO: 252 and SEQ ID NO: 255; SEQ ID NO: 252 and SEQ ID NO: 256; SEQ ID NO: 252 and SEQ ID NO: 257; SEQ ID NO: 252 and SEQ ID NO: 258; SEQ ID NO: 252 and SEQ ID NO: 259; SEQ ID NO: 252 and SEQ ID NO: 260; SEQ ID NO: 252 and SEQ ID NO: 261; SEQ ID NO: 252 and SEQ ID NO: 262; SEQ ID NO: 252 and SEQ ID NO: 263; SEQ ID NO: 252 and SEQ ID NO: 264; SEQ ID NO: 252 and SEQ ID NO: 265; SEQ ID NO: 252 and SEQ ID NO: 266; SEQ ID NO: 252 and SEQ ID NO: 267; SEQ ID NO: 252 and SEQ ID NO: 268; SEQ ID NO: 252 and SEQ ID NO: 269; SEQ ID NO: 253 and SEQ ID NO: 254; SEQ ID NO: 253 and SEQ ID NO: 255; SEQ ID NO: 253 and SEQ ID NO: 256; SEQ ID NO: 253 and SEQ ID NO: 257; SEQ ID NO: 253 and SEQ ID NO: 258; SEQ ID NO: 253 and SEQ ID NO: 259; SEQ ID NO: 253 and SEQ ID NO: 260; SEQ ID NO: 253 and SEQ ID NO: 261; SEQ ID NO: 253 and SEQ ID NO: 262; SEQ ID NO: 253 and SEQ ID NO: 263; SEQ ID NO: 253 and SEQ ID NO: 264; SEQ ID NO: 253 and SEQ ID NO: 265; SEQ ID NO: 253 and SEQ ID NO: 266; SEQ ID NO: 253 and SEQ ID NO: 267; SEQ ID NO: 253 and SEQ ID NO: 268; SEQ ID NO: 253 and SEQ ID NO: 269; SEQ ID NO: 254 and SEQ ID NO: 255; SEQ ID NO: 254 and SEQ ID NO: 256; SEQ ID NO: 254 and SEQ ID NO: 257; SEQ ID NO: 254 and SEQ ID NO: 258; SEQ ID NO: 254 and SEQ ID NO: 259; SEQ ID NO: 254 and SEQ ID NO: 260; SEQ ID NO: 254 and SEQ ID NO: 261; SEQ ID NO: 254 and SEQ ID NO: 262; SEQ ID NO: 254 and SEQ ID NO: 263; SEQ ID NO: 254 and SEQ ID NO: 264; SEQ ID NO: 254 and SEQ ID NO: 265; SEQ ID NO: 254 and SEQ ID NO: 266; SEQ ID NO: 254 and SEQ ID NO: 267; SEQ ID NO: 254 and SEQ ID NO: 268; SEQ ID NO: 254 and SEQ ID NO: 269; SEQ ID NO: 255 and SEQ ID NO: 256; SEQ ID NO: 255 and SEQ ID NO: 257; SEQ ID NO: 255 and SEQ ID NO: 258; SEQ ID NO: 255 and SEQ ID NO: 259; SEQ ID NO: 255 and SEQ ID NO: 260; SEQ ID NO: 255 and SEQ ID NO: 261; SEQ ID NO: 255 and SEQ ID NO: 262; SEQ ID NO: 255 and SEQ ID NO: 263; SEQ ID NO: 255 and SEQ ID NO: 264; SEQ ID NO: 255 and SEQ ID NO: 265; SEQ ID NO: 255 and SEQ ID NO: 266; SEQ ID NO: 255 and SEQ ID NO: 267; SEQ ID NO: 255 and SEQ ID NO: 268; SEQ ID NO: 255 and SEQ ID NO: 269; SEQ ID NO: 256 and SEQ ID NO: 257; SEQ ID NO: 256 and SEQ ID NO: 258; SEQ ID NO: 256 and SEQ ID NO: 259; SEQ ID NO: 256 and SEQ ID NO: 260; SEQ ID NO: 256 and SEQ ID NO: 261; SEQ ID NO: 256 and SEQ ID NO: 262; SEQ ID NO: 256 and SEQ ID NO: 263; SEQ ID NO: 256 and SEQ ID NO: 264; SEQ ID NO: 256 and SEQ ID NO: 265; SEQ ID NO: 256 and SEQ ID NO: 266; SEQ ID NO: 256 and SEQ ID NO: 267; SEQ ID NO: 256 and SEQ ID NO: 268; SEQ ID NO: 256 and SEQ ID NO: 269; SEQ ID NO: 257 and SEQ ID NO: 258; SEQ ID NO: 257 and SEQ ID NO: 259; SEQ ID NO: 257 and SEQ ID NO: 260; SEQ ID NO: 257 and SEQ ID NO: 261; SEQ ID NO: 257 and SEQ ID NO: 262; SEQ ID NO: 257 and SEQ ID NO: 263; SEQ ID NO: 257 and SEQ ID NO: 264; SEQ ID NO: 257 and SEQ ID NO: 265; SEQ ID NO: 257 and SEQ ID NO: 266; SEQ ID NO: 257 and SEQ ID NO: 267; SEQ ID NO: 257 and SEQ ID NO: 268; SEQ ID NO: 257 and SEQ ID NO: 269; SEQ ID NO: 258 and SEQ ID NO: 259; SEQ ID NO: 258 and SEQ ID NO: 260; SEQ ID NO: 258 and SEQ ID NO: 261; SEQ ID NO: 258 and SEQ ID NO: 262; SEQ ID NO: 258 and SEQ ID NO: 263; SEQ ID NO: 258 and SEQ ID NO: 264; SEQ ID NO: 258 and SEQ ID NO: 265; SEQ ID NO: 258 and SEQ ID NO: 266; SEQ ID NO: 258 and SEQ ID NO: 267; SEQ ID NO: 258 and SEQ ID NO: 268; SEQ ID NO: 258 and SEQ ID NO: 269; SEQ ID NO: 259 and SEQ ID NO: 260; SEQ ID NO: 259 and SEQ ID NO: 261; SEQ ID NO: 259 and SEQ ID NO: 262; SEQ ID NO: 259 and SEQ ID NO: 263; SEQ ID NO: 259 and SEQ ID NO: 264; SEQ ID NO: 259 and SEQ ID NO: 265; SEQ ID NO: 259 and SEQ ID NO: 266; SEQ ID NO: 259 and SEQ ID NO: 267; SEQ ID NO: 259 and SEQ ID NO: 268; SEQ ID NO: 259 and SEQ ID NO: 269; SEQ ID NO: 260 and SEQ ID NO: 261; SEQ ID NO: 260 and SEQ ID NO: 262; SEQ ID NO: 260 and SEQ ID NO: 263; SEQ ID NO: 260 and SEQ ID NO: 264; SEQ ID NO: 260 and SEQ ID NO: 265; SEQ ID NO: 260 and SEQ ID NO: 266; SEQ ID NO: 260 and SEQ ID NO: 267; SEQ ID NO: 260 and SEQ ID NO: 268; SEQ ID NO: 260 and SEQ ID NO: 269; SEQ ID NO: 261 and SEQ ID NO: 262; SEQ ID NO: 261 and SEQ ID NO: 263; SEQ ID NO: 261 and SEQ ID NO: 264; SEQ ID NO: 261 and SEQ ID NO: 265; SEQ ID NO: 261 and SEQ ID NO: 266; SEQ ID NO: 261 and SEQ ID NO: 267; SEQ ID NO: 261 and SEQ ID NO: 268; SEQ ID NO: 261 and SEQ ID NO: 269; SEQ ID NO: 262 and SEQ ID NO: 263; SEQ ID NO: 262 and SEQ ID NO: 264; SEQ ID NO: 262 and SEQ ID NO: 265; SEQ ID NO: 262 and SEQ ID NO: 266; SEQ ID NO: 262 and SEQ ID NO: 267; SEQ ID NO: 262 and SEQ ID NO: 268; SEQ ID NO: 262 and SEQ ID NO: 269; SEQ ID NO: 263 and SEQ ID NO: 264; SEQ ID NO: 263 and SEQ ID NO: 265; SEQ ID NO: 263 and SEQ ID NO: 266; SEQ ID NO: 263 and SEQ ID NO: 267; SEQ ID NO: 263 and SEQ ID NO: 268; SEQ ID NO: 263 and SEQ ID NO: 269; SEQ ID NO: 264 and SEQ ID NO: 265; SEQ ID NO: 264 and SEQ ID NO: 266; SEQ ID NO: 264 and SEQ ID NO: 267; SEQ ID NO: 264 and SEQ ID NO: 268; SEQ ID NO: 264 and SEQ ID NO: 269; SEQ ID NO: 265 and SEQ ID NO: 266; SEQ ID NO: 265 and SEQ ID NO: 267; SEQ ID NO: 265 and SEQ ID NO: 268; SEQ ID NO: 265 and SEQ ID NO: 269; SEQ ID NO: 266 and SEQ ID NO: 267; SEQ ID NO: 266 and SEQ ID NO: 268; SEQ ID NO: 266 and SEQ ID NO: 269; SEQ ID NO: 267 and SEQ ID NO: 268; SEQ ID NO: 267 and SEQ ID NO: 269; SEQ ID NO: 268 and SEQ ID NO: 269; SEQ ID NO: 270 and SEQ ID NO: 271; SEQ ID NO: 270 and SEQ ID NO: 272; SEQ ID NO: 270 and SEQ ID NO: 273; SEQ ID NO: 270 and SEQ ID NO: 274; SEQ ID NO: 270 and SEQ ID NO: 275; SEQ ID NO: 270 and SEQ ID NO: 276; SEQ ID NO: 270 and SEQ ID NO: 277; SEQ ID NO: 270 and SEQ ID NO: 278; SEQ ID NO: 270 and SEQ ID NO: 279; SEQ ID NO: 270 and SEQ ID NO: 280; SEQ ID NO: 270 and SEQ ID NO: 281; SEQ ID NO: 270 and SEQ ID NO: 282; SEQ ID NO: 270 and SEQ ID NO: 283; SEQ ID NO: 270 and SEQ ID NO: 284; SEQ ID NO: 270 and SEQ ID NO: 285; SEQ ID NO: 270 and SEQ ID NO: 286; SEQ ID NO: 270 and SEQ ID NO: 287; SEQ ID NO: 270 and SEQ ID NO: 288; SEQ ID NO: 270 and SEQ ID NO: 289; SEQ ID NO: 270 and SEQ ID NO: 290; SEQ ID NO: 270 and SEQ ID NO: 291; SEQ ID NO: 270 and SEQ ID NO: 292; SEQ ID NO: 270 and SEQ ID NO: 924; SEQ ID NO: 270 and SEQ ID NO: 925; SEQ ID NO: 270 and SEQ ID NO: 926; SEQ ID NO: 270 and SEQ ID NO: 927; SEQ ID NO: 270 and SEQ ID NO: 928; SEQ ID NO: 270 and SEQ ID NO: 929; SEQ ID NO: 270 and SEQ ID NO: 930; SEQ ID NO: 270 and SEQ ID NO: 931; SEQ ID NO: 270 and SEQ ID NO: 932; SEQ ID NO: 270 and SEQ ID NO: 933; SEQ ID NO: 270 and SEQ ID NO: 934; SEQ ID NO: 270 and SEQ ID NO: 935; SEQ ID NO: 270 and SEQ ID NO: 936; SEQ ID NO: 270 and SEQ ID NO: 937; SEQ ID NO: 270 and SEQ ID NO: 938; SEQ ID NO: 271 and SEQ ID NO: 272; SEQ ID NO: 271 and SEQ ID NO: 273; SEQ ID NO: 271 and SEQ ID NO: 274; SEQ ID NO: 271 and SEQ ID NO: 275; SEQ ID NO: 271 and SEQ ID NO: 276; SEQ ID NO: 271 and SEQ ID NO: 277; SEQ ID NO: 271 and SEQ ID NO: 278; SEQ ID NO: 271 and SEQ ID NO: 279; SEQ ID NO: 271 and SEQ ID NO: 280; SEQ ID NO: 271 and SEQ ID NO: 281; SEQ ID NO: 271 and SEQ ID NO: 282; SEQ ID NO: 271 and SEQ ID NO: 283; SEQ ID NO: 271 and SEQ ID NO: 284; SEQ ID NO: 271 and SEQ ID NO: 285; SEQ ID NO: 271 and SEQ ID NO: 286; SEQ ID NO: 271 and SEQ ID NO: 287; SEQ ID NO: 271 and SEQ ID NO: 288; SEQ ID NO: 271 and SEQ ID NO: 289; SEQ ID NO: 271 and SEQ ID NO: 290; SEQ ID NO: 271 and SEQ ID NO: 291; SEQ ID NO: 271 and SEQ ID NO: 292; SEQ ID NO: 272 and SEQ ID NO: 924; SEQ ID NO: 272 and SEQ ID NO: 925; SEQ ID NO: 272 and SEQ ID NO: 926; SEQ ID NO: 272 and SEQ ID NO: 927; SEQ ID NO: 272 and SEQ ID NO: 928; SEQ ID NO: 272 and SEQ ID NO: 929; SEQ ID NO: 272 and SEQ ID NO: 930; SEQ ID NO: 272 and SEQ ID NO: 931; SEQ ID NO: 272 and SEQ ID NO: 932; SEQ ID NO: 272 and SEQ ID NO: 933; SEQ ID NO: 272 and SEQ ID NO: 934; SEQ ID NO: 272 and SEQ ID NO: 935; SEQ ID NO: 272 and SEQ ID NO: 936; SEQ ID NO: 272 and SEQ ID NO: 937; SEQ ID NO: 272 and SEQ ID NO: 938; SEQ ID NO: 273 and SEQ ID NO: 924; SEQ ID NO: 273 and SEQ ID NO: 925; SEQ ID NO: 273 and SEQ ID NO: 926; SEQ ID NO: 273 and SEQ ID NO: 927; SEQ ID NO: 273 and SEQ ID NO: 928; SEQ ID NO: 273 and SEQ ID NO: 929; SEQ ID NO: 273 and SEQ ID NO: 930; SEQ ID NO: 273 and SEQ ID NO: 931; SEQ ID NO: 273 and SEQ ID NO: 932; SEQ ID NO: 273 and SEQ ID NO: 933; SEQ ID NO: 273 and SEQ ID NO: 934; SEQ ID NO: 273 and SEQ ID NO: 935; SEQ ID NO: 273 and SEQ ID NO: 936; SEQ ID NO: 273 and SEQ ID NO: 937; SEQ ID NO: 273 and SEQ ID NO: 938; SEQ ID NO: 274 and SEQ ID NO: 924; SEQ ID NO: 274 and SEQ ID NO: 925; SEQ ID NO: 274 and SEQ ID NO: 926; SEQ ID NO: 274 and SEQ ID NO: 927; SEQ ID NO: 274 and SEQ ID NO: 928; SEQ ID NO: 274 and SEQ ID NO: 929; SEQ ID NO: 274 and SEQ ID NO: 930; SEQ ID NO: 274 and SEQ ID NO: 931; SEQ ID NO: 274 and SEQ ID NO: 932; SEQ ID NO: 274 and SEQ ID NO: 933; SEQ ID NO: 274 and SEQ ID NO: 934; SEQ ID NO: 274 and SEQ ID NO: 935; SEQ ID NO: 274 and SEQ ID NO: 936; SEQ ID NO: 274 and SEQ ID NO: 937; SEQ ID NO: 274 and SEQ ID NO: 938; SEQ ID NO: 275 and SEQ ID NO: 924; SEQ ID NO: 275 and SEQ ID NO: 925; SEQ ID NO: 275 and SEQ ID NO: 926; SEQ ID NO: 275 and SEQ ID NO: 927; SEQ ID NO: 275 and SEQ ID NO: 928; SEQ ID NO: 275 and SEQ ID NO: 929; SEQ ID NO: 275 and SEQ ID NO: 930; SEQ ID NO: 275 and SEQ ID NO: 931; SEQ ID NO: 275 and SEQ ID NO: 932; SEQ ID NO: 275 and SEQ ID NO: 933; SEQ ID NO: 275 and SEQ ID NO: 934; SEQ ID NO: 275 and SEQ ID NO: 935; SEQ ID NO: 275 and SEQ ID NO: 936; SEQ ID NO: 275 and SEQ ID NO: 937; SEQ ID NO: 275 and SEQ ID NO: 938; SEQ ID NO: 276 and SEQ ID NO: 924; SEQ ID NO: 276 and SEQ ID NO: 925; SEQ ID NO: 276 and SEQ ID NO: 926; SEQ ID NO: 276 and SEQ ID NO: 927; SEQ ID NO: 276 and SEQ ID NO: 928; SEQ ID NO: 276 and SEQ ID NO: 929; SEQ ID NO: 276 and SEQ ID NO: 930; SEQ ID NO: 276 and SEQ ID NO: 931; SEQ ID NO: 276 and SEQ ID NO: 932; SEQ ID NO: 276 and SEQ ID NO: 933; SEQ ID NO: 276 and SEQ ID NO: 934; SEQ ID NO: 276 and SEQ ID NO: 935; SEQ ID NO: 276 and SEQ ID NO: 936; SEQ ID NO: 276 and SEQ ID NO: 937; SEQ ID NO: 276 and SEQ ID NO: 938; SEQ ID NO: 277 and SEQ ID NO: 924; SEQ ID NO: 277 and SEQ ID NO: 925; SEQ ID NO: 277 and SEQ ID NO: 926; SEQ ID NO: 277 and SEQ ID NO: 927; SEQ ID NO: 277 and SEQ ID NO: 928; SEQ ID NO: 277 and SEQ ID NO: 929; SEQ ID NO: 277 and SEQ ID NO: 930; SEQ ID NO: 277 and SEQ ID NO: 931; SEQ ID NO: 277 and SEQ ID NO: 932; SEQ ID NO: 277 and SEQ ID NO: 933; SEQ ID NO: 277 and SEQ ID NO: 934; SEQ ID NO: 277 and SEQ ID NO: 935; SEQ ID NO: 277 and SEQ ID NO: 936; SEQ ID NO: 277 and SEQ ID NO: 937; SEQ ID NO: 277 and SEQ ID NO: 938; SEQ ID NO: 278 and SEQ ID NO: 924; SEQ ID NO: 278 and SEQ ID NO: 925; SEQ ID NO: 278 and SEQ ID NO: 926; SEQ ID NO: 278 and SEQ ID NO: 927; SEQ ID NO: 278 and SEQ ID NO: 928; SEQ ID NO: 278 and SEQ ID NO: 929; SEQ ID NO: 278 and SEQ ID NO: 930; SEQ ID NO: 278 and SEQ ID NO: 931; SEQ ID NO: 278 and SEQ ID NO: 932; SEQ ID NO: 278 and SEQ ID NO: 933; SEQ ID NO: 278 and SEQ ID NO: 934; SEQ ID NO: 278 and SEQ ID NO: 935; SEQ ID NO: 278 and SEQ ID NO: 936; SEQ ID NO: 278 and SEQ ID NO: 937; SEQ ID NO: 278 and SEQ ID NO: 938; SEQ ID NO: 279 and SEQ ID NO: 924; SEQ ID NO: 279 and SEQ ID NO: 925; SEQ ID NO: 279 and SEQ ID NO: 926; SEQ ID NO: 279 and SEQ ID NO: 927; SEQ ID NO: 279 and SEQ ID NO: 928; SEQ ID NO: 279 and SEQ ID NO: 929; SEQ ID NO: 279 and SEQ ID NO: 930; SEQ ID NO: 279 and SEQ ID NO: 931; SEQ ID NO: 279 and SEQ ID NO: 932; SEQ ID NO: 279 and SEQ ID NO: 933; SEQ ID NO: 279 and SEQ ID NO: 934; SEQ ID NO: 279 and SEQ ID NO: 935; SEQ ID NO: 279 and SEQ ID NO: 936; SEQ ID NO: 279 and SEQ ID NO: 937; SEQ ID NO: 279 and SEQ ID NO: 938; SEQ ID NO: 280 and SEQ ID NO: 924; SEQ ID NO: 280 and SEQ ID NO: 925; SEQ ID NO: 280 and SEQ ID NO: 926; SEQ ID NO: 280 and SEQ ID NO: 927; SEQ ID NO: 280 and SEQ ID NO: 928; SEQ ID NO: 280 and SEQ ID NO: 929; SEQ ID NO: 280 and SEQ ID NO: 930; SEQ ID NO: 280 and SEQ ID NO: 931; SEQ ID NO: 280 and SEQ ID NO: 932; SEQ ID NO: 280 and SEQ ID NO: 933; SEQ ID NO: 280 and SEQ ID NO: 934; SEQ ID NO: 280 and SEQ ID NO: 935; SEQ ID NO: 280 and SEQ ID NO: 936; SEQ ID NO: 280 and SEQ ID NO: 937; SEQ ID NO: 280 and SEQ ID NO: 938; SEQ ID NO: 281 and SEQ ID NO: 924; SEQ ID NO: 281 and SEQ ID NO: 925; SEQ ID NO: 281 and SEQ ID NO: 926; SEQ ID NO: 281 and SEQ ID NO: 927; SEQ ID NO: 281 and SEQ ID NO: 928; SEQ ID NO: 281 and SEQ ID NO: 929; SEQ ID NO: 281 and SEQ ID NO: 930; SEQ ID NO: 281 and SEQ ID NO: 931; SEQ ID NO: 281 and SEQ ID NO: 932; SEQ ID NO: 281 and SEQ ID NO: 933; SEQ ID NO: 281 and SEQ ID NO: 934; SEQ ID NO: 281 and SEQ ID NO: 935; SEQ ID NO: 281 and SEQ ID NO: 936; SEQ ID NO: 281 and SEQ ID NO: 937; SEQ ID NO: 281 and SEQ ID NO: 938; SEQ ID NO: 282 and SEQ ID NO: 924; SEQ ID NO: 282 and SEQ ID NO: 925; SEQ ID NO: 282 and SEQ ID NO: 926; SEQ ID NO: 282 and SEQ ID NO: 927; SEQ ID NO: 282 and SEQ ID NO: 928; SEQ ID NO: 282 and SEQ ID NO: 929; SEQ ID NO: 282 and SEQ ID NO: 930; SEQ ID NO: 282 and SEQ ID NO: 931; SEQ ID NO: 282 and SEQ ID NO: 932; SEQ ID NO: 282 and SEQ ID NO: 933; SEQ ID NO: 282 and SEQ ID NO: 934; SEQ ID NO: 282 and SEQ ID NO: 935; SEQ ID NO: 282 and SEQ ID NO: 936; SEQ ID NO: 282 and SEQ ID NO: 937; SEQ ID NO: 282 and SEQ ID NO: 938; SEQ ID NO: 283 and SEQ ID NO: 924; SEQ ID NO: 283 and SEQ ID NO: 925; SEQ ID NO: 283 and SEQ ID NO: 926; SEQ ID NO: 283 and SEQ ID NO: 927; SEQ ID NO: 283 and SEQ ID NO: 928; SEQ ID NO: 283 and SEQ ID NO: 929; SEQ ID NO: 283 and SEQ ID NO: 930; SEQ ID NO: 283 and SEQ ID NO: 931; SEQ ID NO: 283 and SEQ ID NO: 932; SEQ ID NO: 283 and SEQ ID NO: 933; SEQ ID NO: 283 and SEQ ID NO: 934; SEQ ID NO: 283 and SEQ ID NO: 935; SEQ ID NO: 283 and SEQ ID NO: 936; SEQ ID NO: 283 and SEQ ID NO: 937; SEQ ID NO: 283 and SEQ ID NO: 938; SEQ ID NO: 284 and SEQ ID NO: 924; SEQ ID NO: 284 and SEQ ID NO: 925; SEQ ID NO: 284 and SEQ ID NO: 926; SEQ ID NO: 284 and SEQ ID NO: 927; SEQ ID NO: 284 and SEQ ID NO: 928; SEQ ID NO: 284 and SEQ ID NO: 929; SEQ ID NO: 284 and SEQ ID NO: 930; SEQ ID NO: 284 and SEQ ID NO: 931; SEQ ID NO: 284 and SEQ ID NO: 932; SEQ ID NO: 284 and SEQ ID NO: 933; SEQ ID NO: 284 and SEQ ID NO: 934; SEQ ID NO: 284 and SEQ ID NO: 935; SEQ ID NO: 284 and SEQ ID NO: 936; SEQ ID NO: 284 and SEQ ID NO: 937; SEQ ID NO: 284 and SEQ ID NO: 938; SEQ ID NO: 285 and SEQ ID NO: 924; SEQ ID NO: 285 and SEQ ID NO: 925; SEQ ID NO: 285 and SEQ ID NO: 926; SEQ ID NO: 285 and SEQ ID NO: 927; SEQ ID NO: 285 and SEQ ID NO: 928; SEQ ID NO: 285 and SEQ ID NO: 929; SEQ ID NO: 285 and SEQ ID NO: 930; SEQ ID NO: 285 and SEQ ID NO: 931; SEQ ID NO: 285 and SEQ ID NO: 932; SEQ ID NO: 285 and SEQ ID NO: 933; SEQ ID NO: 285 and SEQ ID NO: 934; SEQ ID NO: 285 and SEQ ID NO: 935; SEQ ID NO: 285 and SEQ ID NO: 936; SEQ ID NO: 285 and SEQ ID NO: 937; SEQ ID NO: 285 and SEQ ID NO: 938; SEQ ID NO: 286 and SEQ ID NO: 924; SEQ ID NO: 286 and SEQ ID NO: 925; SEQ ID NO: 286 and SEQ ID NO: 926; SEQ ID NO: 286 and SEQ ID NO: 927; SEQ ID NO: 286 and SEQ ID NO: 928; SEQ ID NO: 286 and SEQ ID NO: 929; SEQ ID NO: 286 and SEQ ID NO: 930; SEQ ID NO: 286 and SEQ ID NO: 931; SEQ ID NO: 286 and SEQ ID NO: 932; SEQ ID NO: 286 and SEQ ID NO: 933; SEQ ID NO: 286 and SEQ ID NO: 934; SEQ ID NO: 286 and SEQ ID NO: 935; SEQ ID NO: 286 and SEQ ID NO: 936; SEQ ID NO: 286 and SEQ ID NO: 937; SEQ ID NO: 286 and SEQ ID NO: 938; SEQ ID NO: 287 and SEQ ID NO: 924; SEQ ID NO: 287 and SEQ ID NO: 925; SEQ ID NO: 287 and SEQ ID NO: 926; SEQ ID NO: 287 and SEQ ID NO: 927; SEQ ID NO: 287 and SEQ ID NO: 928; SEQ ID NO: 287 and SEQ ID NO: 929; SEQ ID NO: 287 and SEQ ID NO: 930; SEQ ID NO: 287 and SEQ ID NO: 931; SEQ ID NO: 287 and SEQ ID NO: 932; SEQ ID NO: 287 and SEQ ID NO: 933; SEQ ID NO: 287 and SEQ ID NO: 934; SEQ ID NO: 287 and SEQ ID NO: 935; SEQ ID NO: 287 and SEQ ID NO: 936; SEQ ID NO: 287 and SEQ ID NO: 937; SEQ ID NO: 287 and SEQ ID NO: 938; SEQ ID NO: 288 and SEQ ID NO: 924; SEQ ID NO: 288 and SEQ ID NO: 925; SEQ ID NO: 288 and SEQ ID NO: 926; SEQ ID NO: 288 and SEQ ID NO: 927; SEQ ID NO: 288 and SEQ ID NO: 928; SEQ ID NO: 288 and SEQ ID NO: 929; SEQ ID NO: 288 and SEQ ID NO: 930; SEQ ID NO: 288 and SEQ ID NO: 931; SEQ ID NO: 288 and SEQ ID NO: 932; SEQ ID NO: 288 and SEQ ID NO: 933; SEQ ID NO: 288 and SEQ ID NO: 934; SEQ ID NO: 288 and SEQ ID NO: 935; SEQ ID NO: 288 and SEQ ID NO: 936; SEQ ID NO: 288 and SEQ ID NO: 937; SEQ ID NO: 288 and SEQ ID NO: 938; SEQ ID NO: 289 and SEQ ID NO: 924; SEQ ID NO: 289 and SEQ ID NO: 925; SEQ ID NO: 289 and SEQ ID NO: 926; SEQ ID NO: 289 and SEQ ID NO: 927; SEQ ID NO: 289 and SEQ ID NO: 928; SEQ ID NO: 289 and SEQ ID NO: 929; SEQ ID NO: 289 and SEQ ID NO: 930; SEQ ID NO: 289 and SEQ ID NO: 931; SEQ ID NO: 289 and SEQ ID NO: 932; SEQ ID NO: 289 and SEQ ID NO: 933; SEQ ID NO: 289 and SEQ ID NO: 934; SEQ ID NO: 289 and SEQ ID NO: 935; SEQ ID NO: 289 and SEQ ID NO: 936; SEQ ID NO: 289 and SEQ ID NO: 937; SEQ ID NO: 289 and SEQ ID NO: 938; SEQ ID NO: 290 and SEQ ID NO: 924; SEQ ID NO: 290 and SEQ ID NO: 925; SEQ ID NO: 290 and SEQ ID NO: 926; SEQ ID NO: 290 and SEQ ID NO: 927; SEQ ID NO: 290 and SEQ ID NO: 928; SEQ ID NO: 290 and SEQ ID NO: 929; SEQ ID NO: 290 and SEQ ID NO: 930; SEQ ID NO: 290 and SEQ ID NO: 931; SEQ ID NO: 290 and SEQ ID NO: 932; SEQ ID NO: 290 and SEQ ID NO: 933; SEQ ID NO: 290 and SEQ ID NO: 934; SEQ ID NO: 290 and SEQ ID NO: 935; SEQ ID NO: 290 and SEQ ID NO: 936; SEQ ID NO: 290 and SEQ ID NO: 937; SEQ ID NO: 290 and SEQ ID NO: 938; SEQ ID NO: 291 and SEQ ID NO: 924; SEQ ID NO: 291 and SEQ ID NO: 925; SEQ ID NO: 291 and SEQ ID NO: 926; SEQ ID NO: 291 and SEQ ID NO: 927; SEQ ID NO: 291 and SEQ ID NO: 928; SEQ ID NO: 291 and SEQ ID NO: 929; SEQ ID NO: 291 and SEQ ID NO: 930; SEQ ID NO: 291 and SEQ ID NO: 931; SEQ ID NO: 291 and SEQ ID NO: 932; SEQ ID NO: 291 and SEQ ID NO: 933; SEQ ID NO: 291 and SEQ ID NO: 934; SEQ ID NO: 291 and SEQ ID NO: 935; SEQ ID NO: 291 and SEQ ID NO: 936; SEQ ID NO: 291 and SEQ ID NO: 937; SEQ ID NO: 291 and SEQ ID NO: 938; SEQ ID NO: 292 and SEQ ID NO: 924; SEQ ID NO: 292 and SEQ ID NO: 925; SEQ ID NO: 292 and SEQ ID NO: 926; SEQ ID NO: 292 and SEQ ID NO: 927; SEQ ID NO: 292 and SEQ ID NO: 928; SEQ ID NO: 292 and SEQ ID NO: 929; SEQ ID NO: 292 and SEQ ID NO: 930; SEQ ID NO: 292 and SEQ ID NO: 931; SEQ ID NO: 292 and SEQ ID NO: 932; SEQ ID NO: 292 and SEQ ID NO: 933; SEQ ID NO: 292 and SEQ ID NO: 934; SEQ ID NO: 292 and SEQ ID NO: 935; SEQ ID NO: 292 and SEQ ID NO: 936; SEQ ID NO: 292 and SEQ ID NO: 937; SEQ ID NO: 292 and SEQ ID NO: 938; SEQ ID NO: 272 and SEQ ID NO: 273; SEQ ID NO: 272 and SEQ ID NO: 274; SEQ ID NO: 272 and SEQ ID NO: 275; SEQ ID NO: 272 and SEQ ID NO: 276; SEQ ID NO: 272 and SEQ ID NO: 277; SEQ ID NO: 272 and SEQ ID NO: 278; SEQ ID NO: 272 and SEQ ID NO: 279; SEQ ID NO: 272 and SEQ ID NO: 280; SEQ ID NO: 272 and SEQ ID NO: 281; SEQ ID NO: 272 and SEQ ID NO: 282; SEQ ID NO: 272 and SEQ ID NO: 283; SEQ ID NO: 272 and SEQ ID NO: 284; SEQ ID NO: 272 and SEQ ID NO: 285; SEQ ID NO: 272 and SEQ ID NO: 286; SEQ ID NO: 272 and SEQ ID NO: 287; SEQ ID NO: 272 and SEQ ID NO: 288; SEQ ID NO: 272 and SEQ ID NO: 289; SEQ ID NO: 272 and SEQ ID NO: 290; SEQ ID NO: 272 and SEQ ID NO: 291; SEQ ID NO: 272 and SEQ ID NO: 292; SEQ ID NO: 273 and SEQ ID NO: 274; SEQ ID NO: 273 and SEQ ID NO: 275; SEQ ID NO: 273 and SEQ ID NO: 276; SEQ ID NO: 273 and SEQ ID NO: 277; SEQ ID NO: 273 and SEQ ID NO: 278; SEQ ID NO: 273 and SEQ ID NO: 279; SEQ ID NO: 273 and SEQ ID NO: 280; SEQ ID NO: 273 and SEQ ID NO: 281; SEQ ID NO: 273 and SEQ ID NO: 282; SEQ ID NO: 273 and SEQ ID NO: 283; SEQ ID NO: 273 and SEQ ID NO: 284; SEQ ID NO: 273 and SEQ ID NO: 285; SEQ ID NO: 273 and SEQ ID NO: 286; SEQ ID NO: 273 and SEQ ID NO: 287; SEQ ID NO: 273 and SEQ ID NO: 288; SEQ ID NO: 273 and SEQ ID NO: 289; SEQ ID NO: 273 and SEQ ID NO: 290; SEQ ID NO: 273 and SEQ ID NO: 291; SEQ ID NO: 273 and SEQ ID NO: 292; SEQ ID NO: 274 and SEQ ID NO: 275; SEQ ID NO: 274 and SEQ ID NO: 276; SEQ ID NO: 274 and SEQ ID NO: 277; SEQ ID NO: 274 and SEQ ID NO: 278; SEQ ID NO: 274 and SEQ ID NO: 279; SEQ ID NO: 274 and SEQ ID NO: 280; SEQ ID NO: 274 and SEQ ID NO: 281; SEQ ID NO: 274 and SEQ ID NO: 282; SEQ ID NO: 274 and SEQ ID NO: 283; SEQ ID NO: 274 and SEQ ID NO: 284; SEQ ID NO: 274 and SEQ ID NO: 285; SEQ ID NO: 274 and SEQ ID NO: 286; SEQ ID NO: 274 and SEQ ID NO: 287; SEQ ID NO: 274 and SEQ ID NO: 288; SEQ ID NO: 274 and SEQ ID NO: 289; SEQ ID NO: 274 and SEQ ID NO: 290; SEQ ID NO: 274 and SEQ ID NO: 291; SEQ ID NO: 274 and SEQ ID NO: 292; SEQ ID NO: 275 and SEQ ID NO: 276; SEQ ID NO: 275 and SEQ ID NO: 277; SEQ ID NO: 275 and SEQ ID NO: 278; SEQ ID NO: 275 and SEQ ID NO: 279; SEQ ID NO: 275 and SEQ ID NO: 280; SEQ ID NO: 275 and SEQ ID NO: 281; SEQ ID NO: 275 and SEQ ID NO: 282; SEQ ID NO: 275 and SEQ ID NO: 283; SEQ ID NO: 275 and SEQ ID NO: 284; SEQ ID NO: 275 and SEQ ID NO: 285; SEQ ID NO: 275 and SEQ ID NO: 286; SEQ ID NO: 275 and SEQ ID NO: 287; SEQ ID NO: 275 and SEQ ID NO: 288; SEQ ID NO: 275 and SEQ ID NO: 289; SEQ ID NO: 275 and SEQ ID NO: 290; SEQ ID NO: 275 and SEQ ID NO: 291; SEQ ID NO: 275 and SEQ ID NO: 292; SEQ ID NO: 276 and SEQ ID NO: 277; SEQ ID NO: 276 and SEQ ID NO: 278; SEQ ID NO: 276 and SEQ ID NO: 279; SEQ ID NO: 276 and SEQ ID NO: 280; SEQ ID NO: 276 and SEQ ID NO: 281; SEQ ID NO: 276 and SEQ ID NO: 282; SEQ ID NO: 276 and SEQ ID NO: 283; SEQ ID NO: 276 and SEQ ID NO: 284; SEQ ID NO: 276 and SEQ ID NO: 285; SEQ ID NO: 276 and SEQ ID NO: 286; SEQ ID NO: 276 and SEQ ID NO: 287; SEQ ID NO: 276 and SEQ ID NO: 288; SEQ ID NO: 276 and SEQ ID NO: 289; SEQ ID NO: 276 and SEQ ID NO: 290; SEQ ID NO: 276 and SEQ ID NO: 291; SEQ ID NO: 276 and SEQ ID NO: 292; SEQ ID NO: 277 and SEQ ID NO: 278; SEQ ID NO: 277 and SEQ ID NO: 279; SEQ ID NO: 277 and SEQ ID NO: 280; SEQ ID NO: 277 and SEQ ID NO: 281; SEQ ID NO: 277 and SEQ ID NO: 282; SEQ ID NO: 277 and SEQ ID NO: 283; SEQ ID NO: 277 and SEQ ID NO: 284; SEQ ID NO: 277 and SEQ ID NO: 285; SEQ ID NO: 277 and SEQ ID NO: 286; SEQ ID NO: 277 and SEQ ID NO: 287; SEQ ID NO: 277 and SEQ ID NO: 288; SEQ ID NO: 277 and SEQ ID NO: 289; SEQ ID NO: 277 and SEQ ID NO: 290; SEQ ID NO: 277 and SEQ ID NO: 291; SEQ ID NO: 277 and SEQ ID NO: 292; SEQ ID NO: 278 and SEQ ID NO: 279; SEQ ID NO: 278 and SEQ ID NO: 280; SEQ ID NO: 278 and SEQ ID NO: 281; SEQ ID NO: 278 and SEQ ID NO: 282; SEQ ID NO: 278 and SEQ ID NO: 283; SEQ ID NO: 278 and SEQ ID NO: 284; SEQ ID NO: 278 and SEQ ID NO: 285; SEQ ID NO: 278 and SEQ ID NO: 286; SEQ ID NO: 278 and SEQ ID NO: 287; SEQ ID NO: 278 and SEQ ID NO: 288; SEQ ID NO: 278 and SEQ ID NO: 289; SEQ ID NO: 278 and SEQ ID NO: 290; SEQ ID NO: 278 and SEQ ID NO: 291; SEQ ID NO: 278 and SEQ ID NO: 292; SEQ ID NO: 279 and SEQ ID NO: 280; SEQ ID NO: 279 and SEQ ID NO: 281; SEQ ID NO: 279 and SEQ ID NO: 282; SEQ ID NO: 279 and SEQ ID NO: 283; SEQ ID NO: 279 and SEQ ID NO: 284; SEQ ID NO: 279 and SEQ ID NO: 285; SEQ ID NO: 279 and SEQ ID NO: 286; SEQ ID NO: 279 and SEQ ID NO: 287; SEQ ID NO: 279 and SEQ ID NO: 288; SEQ ID NO: 279 and SEQ ID NO: 289; SEQ ID NO: 279 and SEQ ID NO: 290; SEQ ID NO: 279 and SEQ ID NO: 291; SEQ ID NO: 279 and SEQ ID NO: 292; SEQ ID NO: 280 and SEQ ID NO: 281; SEQ ID NO: 280 and SEQ ID NO: 282; SEQ ID NO: 280 and SEQ ID NO: 283; SEQ ID NO: 280 and SEQ ID NO: 284; SEQ ID NO: 280 and SEQ ID NO: 285; SEQ ID NO: 280 and SEQ ID NO: 286; SEQ ID NO: 280 and SEQ ID NO: 287; SEQ ID NO: 280 and SEQ ID NO: 288; SEQ ID NO: 280 and SEQ ID NO: 289; SEQ ID NO: 280 and SEQ ID NO: 290; SEQ ID NO: 280 and SEQ ID NO: 291; SEQ ID NO: 280 and SEQ ID NO: 292; SEQ ID NO: 281 and SEQ ID NO: 282; SEQ ID NO: 281 and SEQ ID NO: 283; SEQ ID NO: 281 and SEQ ID NO: 284; SEQ ID NO: 281 and SEQ ID NO: 285; SEQ ID NO: 281 and SEQ ID NO: 286; SEQ ID NO: 281 and SEQ ID NO: 287; SEQ ID NO: 281 and SEQ ID NO: 288; SEQ ID NO: 281 and SEQ ID NO: 289; SEQ ID NO: 281 and SEQ ID NO: 290; SEQ ID NO: 281 and SEQ ID NO: 291; SEQ ID NO: 281 and SEQ ID NO: 292; SEQ ID NO: 282 and SEQ ID NO: 283; SEQ ID NO: 282 and SEQ ID NO: 284; SEQ ID NO: 282 and SEQ ID NO: 285; SEQ ID NO: 282 and SEQ ID NO: 286; SEQ ID NO: 282 and SEQ ID NO: 287; SEQ ID NO: 282 and SEQ ID NO: 288; SEQ ID NO: 282 and SEQ ID NO: 289; SEQ ID NO: 282 and SEQ ID NO: 290; SEQ ID NO: 282 and SEQ ID NO: 291; SEQ ID NO: 282 and SEQ ID NO: 292; SEQ ID NO: 283 and SEQ ID NO: 284; SEQ ID NO: 283 and SEQ ID NO: 285; SEQ ID NO: 283 and SEQ ID NO: 286; SEQ ID NO: 283 and SEQ ID NO: 287; SEQ ID NO: 283 and SEQ ID NO: 288; SEQ ID NO: 283 and SEQ ID NO: 289; SEQ ID NO: 283 and SEQ ID NO: 290; SEQ ID NO: 283 and SEQ ID NO: 291; SEQ ID NO: 283 and SEQ ID NO: 292; SEQ ID NO: 284 and SEQ ID NO: 285; SEQ ID NO: 284 and SEQ ID NO: 286; SEQ ID NO: 284 and SEQ ID NO: 287; SEQ ID NO: 284 and SEQ ID NO: 288; SEQ ID NO: 284 and SEQ ID NO: 289; SEQ ID NO: 284 and SEQ ID NO: 290; SEQ ID NO: 284 and SEQ ID NO: 291; SEQ ID NO: 284 and SEQ ID NO: 292; SEQ ID NO: 285 and SEQ ID NO: 286; SEQ ID NO: 285 and SEQ ID NO: 287; SEQ ID NO: 285 and SEQ ID NO: 288; SEQ ID NO: 285 and SEQ ID NO: 289; SEQ ID NO: 285 and SEQ ID NO: 290; SEQ ID NO: 285 and SEQ ID NO: 291; SEQ ID NO: 285 and SEQ ID NO: 292; SEQ ID NO: 286 and SEQ ID NO: 287; SEQ ID NO: 286 and SEQ ID NO: 288; SEQ ID NO: 286 and SEQ ID NO: 289; SEQ ID NO: 286 and SEQ ID NO: 290; SEQ ID NO: 286 and SEQ ID NO: 291; SEQ ID NO: 286 and SEQ ID NO: 292; SEQ ID NO: 287 and SEQ ID NO: 288; SEQ ID NO: 287 and SEQ ID NO: 289; SEQ ID NO: 287 and SEQ ID NO: 290; SEQ ID NO: 287 and SEQ ID NO: 291; SEQ ID NO: 287 and SEQ ID NO: 292; SEQ ID NO: 288 and SEQ ID NO: 289; SEQ ID NO: 288 and SEQ ID NO: 290; SEQ ID NO: 288 and SEQ ID NO: 291; SEQ ID NO: 288 and SEQ ID NO: 292; SEQ ID NO: 289 and SEQ ID NO: 290; SEQ ID NO: 289 and SEQ ID NO: 291; SEQ ID NO: 289 and SEQ ID NO: 292; SEQ ID NO: 290 and SEQ ID NO: 291; SEQ ID NO: 290 and SEQ ID NO: 292; SEQ ID NO: 291 and SEQ ID NO: 292.

[0206] In one aspect, a composition is provided comprising a single nucleic acid molecule encoding, or two nucleic acid molecules where one molecule encodes, 1) one or more guide RNA that comprises a guide sequence selected from any one of SEQ ID NOs: 1-159; and 2) a SaCas9. In one aspect, a composition is provided comprising a single nucleic acid molecule encoding, or two nucleic acid molecules where one molecule encodes, 1) one or more guide RNA that comprises a guide sequence selected from any one of SEQ ID NOs: 200-292, 924-938, or 950-955; and 2) a SluCas9.

[0207] In one aspect, a composition is provided comprising a single nucleic acid molecule encoding, or two nucleic acid molecules where one molecule encodes, a) one or more guide RNA that comprises a guide sequence that is at least 99%, 98%, 97%, 96%, 95%, 94%, 93%, 92%, 91%, or 90% identical to any one of SEQ ID NOs: 1-159 and a SaCas9; or b) one or more guide RNA that comprises a guide sequence that is at least 99%, 98%, 97%, 96%, 95%, 94%, 93%, 92%, 91%, or 90% identical to any one of SEQ ID NOs: 200-292, 924-938, or 950-955; and a SluCas9. In one aspect, a composition is provided comprising a single nucleic acid molecule encoding a) one or more guide RNA that comprises a guide sequence that is at least 99%, 98%, 97%, 96%, 95%, 94%, 93%, 92%, 91%, or 90% identical to any one of 1) SEQ ID NOs: 200-292, 924-938, or 950-955, and a SluCas9; or b) one or more guide RNA that comprises a guide sequence that is at least 99%, 98%, 97%, 96%, 95%, 94%, 93%, 92%, 91%, or 90% identical to any one of SEQ ID NOs: 1-159, and a SaCas9.

[0208] In another aspect, a composition is provided comprising a single nucleic acid molecule encoding, or two nucleic acid molecules where one molecule encodes, a) one or more guide RNA that comprises a guide sequence comprising at least 16, 17, 18, 19, or 20 contiguous nucleotides of a spacer sequence selected from any one of SEQ ID NOs: 1-159 and a SaCas9; or b) one or more guide RNA that comprises a guide sequence comprising at least 16, 17, 18, 19, or 20 contiguous nucleotides of a spacer sequence selected from any one of SEQ ID NOs: 200-292, 924-938, or 950-955 and a SluCas9. In another aspect, a composition is provided comprising a single nucleic acid molecule encoding, or two nucleic acid molecules where one molecule encodes, a) one or more guide RNA that comprises a guide sequence comprising at least 16, 17, 18, 19, or 20 contiguous nucleotides of a spacer sequence selected from any one of SEQ ID NOs: 1-159 and a SaCas9; or b) one or more guide RNA that comprises a guide sequence comprising at least 16, 17, 18, 19, or 20 contiguous nucleotides of a spacer sequence selected from any one of SEQ ID NOs: 200-292, 924-938, or 950-955 and a SluCas9.

[0209] In some embodiments, any of the guides disclosed herein may be used as a research tool, e.g., to study trafficking, expression, and processing by cells.

### Scaffold Sequences

[0210] Each of the guide sequences shown in Table 6 may further comprise additional nucleotides to form or encode a crRNA, e.g., using any known sequence appropriate for the Cas9 being used. In some embodiments, the crRNA comprises (5′ to 3′) at least a spacer sequence and a first complementarity domain. The first complementary domain is sufficiently complementary to a second complementarity domain, which may be part ofthe same molecule in the case of an sgRNA or in a tracrRNA in the case of a dual or modular gRNA, to form a duplex. See, e.g., US 2017/0007679 for detailed discussion of crRNA and gRNA domains, including first and second complementarity domains.

[0211] A single-molecule guide RNA (sgRNA) can comprise, in the 5′ to 3′ direction, an optional spacer extension sequence, a spacer sequence, a minimum CRISPR repeat sequence, a single-molecule guide linker, a minimum tracrRNA sequence, a 3′ tracrRNA sequence and/or an optional tracrRNA extension sequence. The optional tracrRNA extension can comprise elements that contribute additional functionality (e.g., stability) to the guide RNA. The single-molecule guide linker can link the minimum CRISPR repeat and the minimum tracrRNA sequence to form a hairpin structure. The optional tracrRNA extension can comprise one or more hairpins. In particular embodiments, the disclosure provides for an sgRNA comprising a spacer sequence and a tracrRNA sequence.

[0212] The guide RNA can be considered to comprise a scaffold sequence necessary for endonuclease binding and a spacer sequence required to bind to the genomic target sequence. In some embodiments, the guide RNA comprises any of the scaffold sequences disclosed herein and any of the spacer sequences disclosed herein. In some embodiments, the guide RNA comprises any of the scaffold sequences disclosed herein and any of the spacer sequences disclosed herein, without any nucleotides between the scaffold sequence and the spacer sequence.

An exemplary scaffold sequence suitable for use with SaCas9 to follow the guide sequence at its 3′ end is: GTTTAAGTACTCTGTGCTGGAAACAGCACAGAATCTACTTAAACAAGGCAAAATGCCGT GTTTATCTCGTCAACTTGTTGGCGAGA (SEQ ID NO: 500) in 5′ to 3′ orientation. In some embodiments, an exemplary scaffold sequence for use with SaCas9 to follow the 3′ end of the guide sequence is a sequence that is at least 80%, 85%, 90%, 91%, 92%, 93%, 94%, 95%, 96%, 97%, 98%, 99% or 100% identical to SEQ ID NO: 500, or a sequence that differs from SEQ ID NO: 500 by no more than 1, 2, 3, 4, 5, 10, 15, 20, or 25 nucleotides.

[0213] In some embodiments, a variant of an SaCas9 scaffold sequence may be used. In some embodiments, the SaCas9 scaffold to follow the guide sequence at its 3′ end is referred to as “SaScaffoldV1” and is: GTTTTAGTACTCTGGAAACAGAATCTACTAAAACAAGGCAAAATGCCGTGTTTATCTCGT CAACTTGTTGGCGAGAT (SEQ ID NO: 501) in 5′ to 3′ orientation. In some embodiments, an exemplary scaffold sequence for use with SaCas9 to follow the 3′ end of the guide sequence is a sequence that is at least 80%, 85%, 90%, 91%, 92%, 93%, 94%, 95%, 96%, 97%, 98%, 99% or 100% identical to SEQ ID NO: 501, or a sequence that differs from SEQ ID NO: 501 by no more than 1, 2, 3, 4, 5, 10, 15, 20, or 25 nucleotides.

[0214] In some embodiments, a variant of an SaCas9 scaffold sequence may be used. In some embodiments, the SaCas9 scaffold to follow the guide sequence at its 3′ end is referred to as “SaScaffoldV2” and is: GTTTAAGTACTCTGTGCTGGAAACAGCACAGAATCTACTTAAACAAGGCAAAATGCCGT GTTTATCTCGTCAACTTGTTGGCGAGAT (SEQ ID NO: 502) in 5′ to 3′ orientation. In some embodiments, an exemplary scaffold sequence for use with SaCas9 to follow the 3′ end of the guide sequence is a sequence that is at least 80%, 85%, 90%, 91%, 92%, 93%, 94%, 95%, 96%, 97%, 98%, 99% or 100% identical to SEQ ID NO: 502, or a sequence that differs from SEQ ID NO: 502 by no more than 1, 2, 3, 4, 5, 10, 15, 20, or 25 nucleotides.

[0215] In some embodiments, a variant of an SaCas9 scaffold sequence may be used. In some embodiments, the SaCas9 scaffold to follow the guide sequence at its 3′ end is referred to as “SaScaffoldV3” and is: GTTTAAGTACTCTGGAAACAGAATCTACTTAAACAAGGCAAAATGCCGTGTTTATCTCGT CAACTTGTTGGCGAGAT (SEQ ID NO: 503) in 5′ to 3′ orientation. In some embodiments, an exemplary scaffold sequence for use with SaCas9 to follow the 3′ end of the guide sequence is a sequence that is at least 80%, 85%, 90%, 91%, 92%, 93%, 94%, 95%, 96%, 97%, 98%, 99% or 100% identical to SEQ ID NO: 503, or a sequence that differs from SEQ ID NO: 503 by no more than 1, 2, 3, 4, 5, 10, 15, 20, or 25 nucleotides.

[0216] In some embodiments, a variant of an SaCas9 scaffold sequence may be used. In some embodiments, the SaCas9 scaffold to follow the guide sequence at its 3′ end is referred to as “SaScaffoldV5” and is: GTTTCAGTACTCTGGAAACAGAATCTACTGAAACAAGGCAAAATGCCGTGTTTATCTCGT CAACTTGTTGGCGAGAT (SEQ ID NO: 504) in 5′ to 3′ orientation. In some embodiments, an exemplary scaffold sequence for use with SaCas9 to follow the 3′ end ofthe guide sequence is a sequence that is at least 80%, 85% o, 90%, 91%, 92% o, 93%, 94%, 95%, 96% o, 97%, 98% o, 99% o or 10000 identical to SEQ ID NO: 504, or a sequence that differs from SEQ ID NO: 504 by no more than 1, 2, 3, 4, 5, 10, 15, 20, or 25 nucleotides.

[0217] Two exemplary scaffold sequences suitable for use with SluCas9 to follow the guide sequence at its 3′ end are: GTTTTAGTACTCTGGAAACAGAATCTACTGAAACAAGACAATATGTCGTGTTTATCCCAT CAATTTATTGGTGGGA (SEQ ID NO: 600), or GTTTAAGTACTCTGTGCTGGAAACAGCACAGAATCTACTGAAACAAGACAATATGTCGT GTTTATCCCATCAATTTATTGGTGGGA (SEQ ID NO: 601) in 5′ to 3′ orientation. In some embodiments, an exemplary sequence for use with SluCas9 to follow the 3′ end of the guide sequence is a sequence that is at least 80%, 85%, 90%, 91%, 92%, 93%, 94%, 95%, 96%, 97%, 98%, 99% or 100% identical to SEQ ID NO: 600 or SEQ ID NO: 601, or a sequence that differs from SEQ ID NO: 600 or SEQ ID NO: 601 by no more than 1, 2, 3, 4, 5, 10, 15, 20, or 25 nucleotides.

[0218] Exemplary scaffold sequences suitable for use with SluCas9 to follow the guide sequence at its 3′ end are also shown below in the 5′ to 3′ orientation.

TABLE 7

| | | | | Streak of |
|---|---|---|---|---|
| | | | | Homology to |
| Scaffold | SEQ | | Homology | Slu v5 |
| ID | ID NO | Scaffold Sequence (5′ to 3′) | to Slu v5 | (# nucleotides) |
| Wildtype | 900 | GTTTTAGTACTCTGGAAACAGAATCTACTGAA | N/A | N/A |
| | | ACAAGACAATATGTCGTGTTTATCCCATCAAT | | |
| | | TTATTGGTGGGAT | | |
| Slu- | 601 | GTTTAAGTACTCTGTGCTGGAAACAGCACAG | N/A | N/A |
| VCGT- | | AATCTACTGAAACAAGACAATATGTCGTGTTT | | |
| 4.5 | | ATCCCATCAATTTATTGGTGGGA | | |
| Slu_v5 | 901 | GTTTCAGTACTCTGGAAACAGAATCTACTGAA | 100.00% | 77 |
| | | ACAAGACAATATGTCGTGTTTATCCCATCAAT | | |
| | | TTATTGGTGGGAT | | |
| Slu_v5-1 | 902 | GTTTggTaACcTaGGAAACTagATCTTaccAAACA | 87.50% | 47 |
| | | AGACAATATGTCGTGTTTATCCCATCAATTTA | | |
| | | TTGGTGGGAT | | |
| Slu_v5-2 | 903 | GTTTCAGTACTCTGGAAACAGAATCTACTGAA | 96.10% | 37 |
| | | ACAAGgCAAaATGcCGTGTTTATCCCATCAATT | | |
| | | TATTGGTGGGAT | | |
| Slu_v5-3 | 904 | GTTTCAGTACTCTGGAAACAGAATCTACTGAA | 94.81% | 48 |
| | | ACAAGACAATATGTCGcgcccaTCCCATCAATTT | | |
| | | ATTGGTGGGAT | | |
| Slu_v5-4 | 905 | GTTTCAGTACTCTGGAAACAGAATCTACTGAA | 91.55% | 55 |
| | | ACAAGACAATATGTCGTGTTTATgggTTgAATT | | |
| | | TATTcGacccAT | | |
| Slu_v5-5 | 906 | GTTTggTaACcTaGGAAACTagATCTTaccAAACA | 83.75% | 31 |
| | | AGgCAAaATGcCGTGTTTATCCCATCAATTTAT | | |
| | | TGGTGGGAT | | |
| Slu_v5-6 | 907 | GTTTggTaACcTaGGAAACTagATCTTaccAAACA | 82.50% | 23 |
| | | AGACAATATGTCGcgcccaTCCCATCAATTTATT | | |
| | | GGTGGGAT | | |
| Slu_v5-7 | 908 | GTTTggTaACcTaGGAAACTagATCTTaccAAACA | 78.38% | 25 |
| | | AGACAATATGTCGTGTTTATgggTTgAATTTAT | | |
| | | TcGacccAT | | |
| Slu_v5-8 | 909 | GTTTCAGTACTCTGGAAACAGAATCTACTGAA | 90.91% | 37 |
| | | ACAAGgCAAaATGcCGcgcccaTCCCATCAATTTA | | |
| | | TTGGTGGGAT | | |
| Slu_v5-9 | 910 | GTTTCAGTACTCTGGAAACAGAATCTACTGAA | 87.32% | 37 |
| | | ACAAGgCAAaATGcCGTGTTTATgggTTgAATTT | | |
| | | ATTcGacccAT | | |
| Slu_v5- | 911 | GTTTCAGTACTCTGGAAACAGAATCTACTGAA | 82.89% | 48 |
| 10 | | ACAAGACAATATGTCGcgcccaTgggTTgAATTTA | | |
| | | TTcGacccAT | | |
| Slu_v5- | 912 | GTTTggTaACcTaGGAAACTagATCTTaccAAACA | 78.75% | 23 |
| 11 | | AGgCAAaATGcCGcgcccaTCCCATCAATTTATTG | | |
| | | GTGGGAT | | |
| Slu_v5- | 913 | GTTTggTaACcTaGGAAACTagATCTTaccAAACA | 74.32% | 9 |
| 12 | | AGgCAAaATGcCGTGTTTATgggTTgAATTTATTc | | |
| | | GacccAT | | |
| Slu_v5- | 914 | GTTTggTaACcTaGGAAACTagATCTTaccAAACA | 70.89% | 18 |
| 13 | | AGACAATATGTCGcgcccaTgggTTgAATTTATTc | | |
| | | GacccAT | | |
| Slu_v5- | 915 | GTTTCAGTACTCTGGAAACAGAATCTACTGAA | 78.95% | 37 |
| 14 | | ACAAGgCAAaATGcCGcgcccaTgggTTgAATTTAT | | |
| | | TcGacccAT | | |
| Slu_v5- | 916 | GTTTggTaACcTaGGAAACTagATCTTaccAAACA | 67.09% | 8 |
| 15 | | AGgCAAaATGcCGcgcccaTgggTTgAATTTATTcGa | | |
| | | cccAT | | |
| Slu_v4 | 917 | GTTTCAGTACTCTGTGCTGGAAACAGCACAGA | N/A | N/A |
| | | ATCTACTGAAACAAGACAATATGTCGTGTTTA | | |
| | | TCCCATCAATTTATTGGTGGGAT | | |

[0219] In some embodiments, the scaffold sequence suitable for use with SaCas9 to follow the guide sequence at its 3′ end is selected from any one of SEQ ID NOs: 500-504 in 5′ to 3 orientation. In some embodiments, an exemplary sequence for use with SaCas9 to follow the 3′ end of the guide sequence is a sequence that is at least 65% o, 70%, 75%, 80%, 85% o, 90%, 91%, 92% o, 93%, 94%, 95%, 96% o, 97%, 98% o, 99% o or 100% o identical to any one off SEQ ID NOs: 500-504, or a sequence that differs from any one of SEQ ID NOs: 500-504 by no more than 1, 2, 3, 4, 5, 10, 15, 20, or 25 nucleotides.

[0220] In some embodiments, the scaffold sequence suitable for use with SluCas9 to follow the guide sequence at its 3′ end is selected from any one of SEQ ID NOs: 900 or 601, or 901-917 in 5′ to 3 orientation. In some embodiments, an exemplary sequence for use with SluCas9 to follow the 3′ end of the guide sequence is a sequence that is at least 65% o, 70%, 75%, 80%, 85% o, 90% o, 91% o, 92% o, 93%, 94%, 95% o, 96% o, 97%, 98% o, 99% o or 100% o identical to any one off SEQ ID NOs: 900 or 601, or 901-917, or a sequence that differs from any one of SEQ ID NOs: 900 or 601, or 901-917 by no more than 1, 2, 3, 4, 5, 10, 15, 20, or 25 nucleotides.

[0221] In some embodiments, any scaffold sequence (e.g., any of the scaffold sequences disclosed herein) is suitable for use with any sRGN disclosed herein, such as any one of sRGN1, sRGN2, sRGN3, sRGN3.1, sRGN3.2, sRGN3.3, sRGN4, or a nucleic acid molecule encoding the same. In some embodiments, a scaffold sequence suitable for use with a sRGN, such as at the 3′ end of a guide RNA sequence within an expression vector comprising the sRGN (e.g., an expression vector as shown in FIGS. 5A-5B) is selected from any one of SEQ ID NOs: 500-504, 601, or 900-917. In some embodiments, a scaffold sequence suitable for use with a sRGN, such as at the 3′ end of a guide RNA sequence within an expression vector comprising the sRGN (e.g., an expression vector as shown in FIGS. 5A-5B) is a sequence that is at least 65%, 70%, 75%, 80%, 85%, 90%, 91%, 92%, 93%, 94%, 95%, 96%, 97%, 98%, 99% or 100% identical to any one of SEQ ID NOs: 500-504, 601, or 900-917, or a sequence that differs from any one of SEQ ID NOs: 500-504, 601, or 900-917 by no more than 1, 2, 3, 4, 5, 10, 15, 20, or 25 nucleotides.

[0222] In some embodiments, the nucleic acid encoding the gRNA comprises a sequence comprising SEQ ID NO: 500. In some embodiments, the nucleic acid encoding the gRNA comprises a sequence comprising SEQ ID NO: 501. In some embodiments, the nucleic acid encoding the gRNA comprises a sequence comprising SEQ ID NO: 502. In some embodiments, the nucleic acid encoding the gRNA comprises a sequence comprising SEQ ID NO: 503. In some embodiments, the nucleic acid encoding the gRNA comprises a sequence comprising SEQ ID NO: 504. In some embodiments, comprising a pair of gRNAs, one of the gRNAs comprises a sequence selected from any one of SEQ ID NOs: 500-504. In some embodiments, comprising a pair of gRNAs, both of the gRNAs comprise a sequence selected from any one of SEQ ID NOs: 500-504. In some embodiments, comprising a pair of gRNAs, the nucleotides 3′ of the guide sequence of the gRNAs are the same sequence. In some embodiments, comprising a pair of gRNAs, the nucleotides 3′ of the guide sequence of the gRNAs are different sequences.

[0223] In some embodiments, the nucleic acid encoding the gRNA comprises a sequence comprising SEQ ID NO: 900. In some embodiments, the nucleic acid encoding the gRNA comprises a sequence comprising SEQ ID NO: 601. In some embodiments, the nucleic acid encoding the gRNA comprises a sequence comprising SEQ ID NO: 900. In some embodiments, the nucleic acid encoding the gRNA comprises a sequence comprising SEQ ID NO: 901. In some embodiments, the nucleic acid encoding the gRNA comprises a sequence comprising SEQ ID NO: 902. In some embodiments, the nucleic acid encoding the gRNA comprises a sequence comprising SEQ ID NO: 903. In some embodiments, the nucleic acid encoding the gRNA comprises a sequence comprising SEQ ID NO: 904. In some embodiments, the nucleic acid encoding the gRNA comprises a sequence comprising SEQ ID NO: 905. In some embodiments, the nucleic acid encoding the gRNA comprises a sequence comprising SEQ ID NO: 906. In some embodiments, the nucleic acid encoding the gRNA comprises a sequence comprising SEQ ID NO: 907. In some embodiments, the nucleic acid encoding the gRNA comprises a sequence comprising SEQ ID NO: 908. In some embodiments, the nucleic acid encoding the gRNA comprises a sequence comprising SEQ ID NO: 909. In some embodiments, the nucleic acid encoding the gRNA comprises a sequence comprising SEQ ID NO: 910. In some embodiments, the nucleic acid encoding the gRNA comprises a sequence comprising SEQ ID NO: 911. In some embodiments, the nucleic acid encoding the gRNA comprises a sequence comprising SEQ ID NO: 912. In some embodiments, the nucleic acid encoding the gRNA comprises a sequence comprising SEQ ID NO: 913. In some embodiments, the nucleic acid encoding the gRNA comprises a sequence comprising SEQ ID NO: 914. In some embodiments, the nucleic acid encoding the gRNA comprises a sequence comprising SEQ ID NO: 915. In some embodiments, the nucleic acid encoding the gRNA comprises a sequence comprising SEQ ID NO: 916. In some embodiments, the nucleic acid encoding the gRNA comprises a sequence comprising SEQ ID NO: 917. In some embodiments, comprising a pair of gRNAs, one of the gRNAs comprises a sequence selected from any one of SEQ ID NOs: 900 or 601, or 901-917. In some embodiments, comprising a pair of gRNAs, both of the gRNAs comprise a sequence selected from any one of SEQ ID NOs: 900 or 601, or 901-917. In some embodiments, comprising a pair of gRNAs, the nucleotides 3′ of the guide sequence of the gRNAs are the same sequence. In some embodiments, comprising a pair of gRNAs, the nucleotides 3′ of the guide sequence of the gRNAs are different sequences.

[0224] In some embodiments, the scaffold sequence comprises one or more alterations in the stem loop 1 as compared to the stem loop 1 of a wildtype SluCas9 scaffold sequence (e.g., a scaffold comprising the sequence of SEQ ID NO: 900) or a reference SluCas9 scaffold sequence (e.g., a scaffold comprising the sequence of SEQ ID NO: 901). In some embodiments, the scaffold sequence comprises one or more alterations in the stem loop 2 as compared to the stem loop 2 of a wildtype SluCas9 scaffold sequence (e.g., a scaffold comprising the sequence of SEQ ID NO: 900) or a reference SluCas9 scaffold sequence (e.g., a scaffold comprising the sequence of SEQ ID NO: 901). In some embodiments, the scaffold sequence comprises one or more alterations in the tetraloop as compared to the tetraloop of a wildtype SluCas9 scaffold sequence (e.g., a scaffold comprising the sequence of SEQ ID NO: 900) or a reference SluCas9 scaffold sequence (e.g., a scaffold comprising the sequence of SEQ ID NO: 901). In some embodiments, the scaffold sequence comprises one or more alterations in the repeat region as compared to the repeat region of a wildtype SluCas9 scaffold sequence (e.g., a scaffold comprising the sequence of SEQ ID NO: 900) or a reference SluCas9 scaffold sequence (e.g., a scaffold comprising the sequence of SEQ ID NO: 901). In some embodiments, the scaffold sequence comprises one or more alterations in the anti-repeat region as compared to the anti-repeat region of a wildtype SluCas9 scaffold sequence (e.g., a scaffold comprising the sequence of SEQ ID NO: 900) or a reference SluCas9 scaffold sequence (e.g., a scaffold comprising the sequence of SEQ ID NO: 901). In some embodiments, the scaffold sequence comprises one or more alterations in the linker region as compared to the linker region of a wildtype SluCas9 scaffold sequence (e.g., a scaffold comprising the sequence of SEQ ID NO: 900) or a reference SluCas9 scaffold sequence (e.g., a scaffold comprising the sequence of SEQ ID NO: 901). See, e.g., Nishimasu et al., 2015, Cell, 162:1113-1126 for description of regions of a scaffold.

[0225] Where a tracrRNA is used, in some embodiments, it comprises (5′ to 3′) a second complementary domain and a proximal domain. In the case of a sgRNA, guide sequences together with additional nucleotides (e.g., SEQ ID Nos: 500-504 (for SaCas9), and 900 or 601, or 901-917 (for SluCas9)) form or encode a sgRNA. In some embodiments, an sgRNA comprises (5′ to 3′) at least a spacer sequence, a first complementary domain, a linking domain, a second complementary domain, and a proximal domain. A sgRNA or tracrRNA may further comprise a tail domain. The linking domain may be hairpin-forming. See, e.g., US 2017/0007679 for detailed discussion and examples of crRNA and gRNA domains, including second complementarity domains, linking domains, proximal domains, and tail domains.

[0226] In some embodiments, the disclosure provides for specific nucleic acid sequences encoding one or more guide RNA components (e.g., any of the spacer and or scaffold sequences disclosed herein). The disclosure contemplates RNA equivalents of any of the DNA sequences provided herein (i.e., in which “T”s are replaced with “U”s), or DNA equivalents of any of the RNA sequences provided herein (i.e., in which “U”s are replaced with “T”s), as well as complements (including reverse complements) of any of the sequences disclosed herein.

[0227] In some embodiments, a composition is provided comprising a guide RNA, or nucleic acid encoding a guide RNA, wherein the guide RNA further comprises a trRNA. In each composition and method embodiment described herein, the crRNA (comprising the spacer sequence) and trRNA may be associated as a single RNA (sgRNA) or may be on separate RNAs (dgRNA). In the context of sgRNAs, the crRNA and trRNA components may be covalently linked, e.g., via a phosphodiester bond or other covalent bond.

### Vectors

[0228] In any embodiment comprising a nucleic acid molecule encoding a guide RNA and/or a Cas9, the nucleic acid molecule may be a vector. In some embodiments, a composition is provided comprising a single nucleic acid molecule encoding at least one guide RNA and Cas9, wherein the nucleic acid molecule is a vector. In some embodiments, a composition is provided comprising more than one nucleic acid molecule encoding a guide RNA and Cas9, wherein the nucleic acid molecule is a vector. In some embodiments, a composition is provided comprising more than one nucleic acid molecule wherein one molecule encodes one or more guide RNA, and the other molecule encodes Cas9 plus or minus at least one guide RNA, wherein the nucleic acid molecule is a vector.

[0229] Any type of vector, such as any of those described herein, may be used. In some embodiments, the vector is a lipid nanoparticle. In some embodiments, the vector is a viral vector. In some embodiments, the viral vector is a non-integrating viral vector (i.e., that does not insert sequence from the vector into a host chromosome). In some embodiments, the viral vector is an adeno-associated virus vector (AAV), a lentiviral vector, an integrase-deficient lentiviral vector, an adenoviral vector, a vaccinia viral vector, an alphaviral vector, or a herpes simplex viral vector. In some embodiments, the vector comprises a muscle-specific promoter. Exemplary muscle-specific promoters include a muscle creatine kinase promoter, a desmin promoter, an MHCK7 promoter, or an SPc5-12 promoter. See US 2004/0175727 A1; Wang et al., Expert Opin Drug Deliv. (2014) 11, 345-364; Wang et al., Gene Therapy (2008) 15, 1489-1499. In some embodiments, the muscle-specific promoter is a CK8 promoter. In some embodiments, the muscle-specific promoter is a CK8e promoter. In any of the foregoing embodiments, the vector may be an adeno-associated virus vector (AAV).

[0230] In some embodiments, the vector is a lipid nanoparticle comprising an endonuclease (e.g., any of the endonucleases disclosed herein) and one or more of any of the guide RNAs disclosed herein. In some embodiments, the vector is a lipid nanoparticle comprising a nucleic acid encoding an endonuclease (e.g., any of the endonucleases disclosed herein) and one or more of any of the guide RNAs disclosed herein. In some embodiments, the vector is a lipid nanoparticle comprising a nucleic acid encoding an endonuclease (e.g., any of the endonucleases disclosed herein) and a nucleic acid encoding one or more of any of the guide RNAs disclosed herein.

[0231] Where a vector is used, it may be a viral vector, such as a non-integrating viral vector. In some embodiments, the viral vector is an adeno-associated virus vector, a lentiviral vector, an integrase-deficient lentiviral vector, an adenoviral vector, a vaccinia viral vector, an alphaviral vector, or a herpes simplex viral vector. In some embodiments, the viral vector is an adeno-associated virus (AAV) vector. In some embodiments, the AAV vector is an AAV1, AAV2, AAV3, AAV4, AAV5, AAV6, AAV7, AAV8, AAVrh10 (see, e.g., SEQ ID NO: 81 of U.S. Pat. No. 9,790,472, which is incorporated by reference herein in its entirety), AAVrh74 (see, e.g., SEQ ID NO: 1 of US 2015/0111955, which is incorporated by reference herein in its entirety), or AAV9 vector, wherein the number following AAV indicates the AAV serotype. In some embodiments, the AAV vector is a single-stranded AAV (ssAAV). In some embodiments, the AAV vector is a double-stranded AAV (dsAAV). Any variant of an AAV vector or serotype thereof, such as a self-complementary AAV (scAAV) vector, is encompassed within the general terms AAV vector, AAV1 vector, etc. See, e.g., McCarty et al., Gene Ther. 2001; 8:1248-54, Naso et al., BioDrugs 2017; 31:317-334, and references cited therein for detailed discussion of various AAV vectors. In some embodiments, the AAV vector size is measured in length of nucleotides from ITR to ITR, inclusive of both ITRs. In some embodiments, the AAV vector is less than 5 kb in size from ITR to ITR, inclusive of both ITRs. In particular embodiments, the AAV vector is less than 4.9 kb from ITR to ITR in size, inclusive of both ITRs. In further embodiments, the AAV vector is less than 4.85 kb in size from ITR to ITR, inclusive of both ITRs. In further embodiments, the AAV vector is less than 4.8 kb in size from ITR to ITR, inclusive of both ITRs. In further embodiments, the AAV vector is less than 4.75 kb in size from ITR to ITR, inclusive of both ITRs. In further embodiments, the AAV vector is less than 4.7 kb in size from ITR to ITR, inclusive of both ITRs. In some embodiments, the vector is between 3.9-5 kb, 4-5 kb, 4.2-5 kb, 4.4-5 kb, 4.6-5 kb, 4.7-5 kb, 3.9-4.9 kb, 4.2-4.9 kb, 4.4-4.9 kb, 4.7-4.9 kb, 3.9-4.85 kb, 4.2-4.85 kb, 4.4-4.85 kb, 4.6-4.85 kb, 4.7-4.85 kb, 4.7-4.9 kb, 3.9-4.8 kb, 4.2-4.8 kb, 4.4-4.8 kb or 4.6-4.8 kb from ITR to ITR in size, inclusive of both ITRs. In some embodiments, the vector is between 4.4-4.85 kb in size from ITR to ITR, inclusive of both ITRs. In some embodiments, the vector is an AAV9 vector.

[0232] In some embodiments, the vector (e.g., viral vector, such as an adeno-associated viral vector) comprises a tissue-specific (e.g., muscle-specific) promoter, e.g., which is operatively linked to a sequence encoding the guide RNA and/or the Cas protein. In some embodiments, the muscle-specific promoter is a muscle creatine kinase promoter, a desmin promoter, an MHCK7 promoter, or an SPc5-12 promoter. In some embodiments, the muscle-specific promoter is a CK8 promoter. In some embodiments, the muscle-specific promoter is a CK8e promoter. Muscle-specific promoters are described in detail, e.g., in US2004/0175727 A1; Wang et al., Expert Opin Drug Deliv. (2014) 11, 345-364; Wang et al., Gene Therapy (2008) 15, 1489-1499. In some embodiments, the tissue-specific promoter is a neuron-specific promoter, such as an enolase promoter. See, e.g., Naso et al., BioDrugs 2017; 31:317-334; Dashkoff et al., Mol Ther Methods Clin Dev. 2016; 3:16081, and references cited therein for detailed discussion of tissue-specific promoters including neuron-specific promoters.

[0233] In some embodiments, in addition to guide RNA and Cas9 sequences, the vectors further comprise nucleic acids that do not encode guide RNAs. Nucleic acids that do not encode guide RNA and Cas9 include, but are not limited to, promoters, enhancers, and regulatory sequences. In some embodiments, the vector comprises one or more nucleotide sequence(s) encoding a crRNA, a trRNA, or a crRNA and trRNA. In some embodiments, the muscle specific promoter is the CK8 promoter. The CK8 promoter has the following sequence (SEQ ID NO. 700):

| | |
|---|---|
| 1 | CTAGACTAGC ATGCTGCCCA TGTAAGGAGG CAAGGCCTGG |
| | GGACACCCGA GATGCCTGGT |
| 61 | TATAATTAAC CCAGACATGT GGCTGCCCCC CCCCCCCCAA |
| | CACCTGCTGC CTCTAAAAAT |
| 121 | AACCCTGCAT GCCATGTTCC CGGCGAAGGG CCAGCTGTCC |
| | CCCGCCAGCT AGACTCAGCA |
| 181 | CTTAGTTTAG GAACCAGTGA GCAAGTCAGC CCTTGGGGCA |
| | GCCCATACAA GGCCATGGGG |
| 241 | CTGGGCAAGC TGCACGCCTG GGTCCGGGGT GGGCACGGTG |
| | CCCGGGCAAC GAGCTGAAAG |
| 301 | CTCATCTGCT CTCAGGGGCC CCTCCCTGGG GACAGCCCCT |
| | CCTGGCTAGT CACACCCTGT |
| 361 | AGGCTCCTCT ATATAACCCA GGGGCACAGG GGCTGCCCTC |
| | ATTCTACCAC CACCTCCACA |
| 421 | GCACAGACAG ACACTCAGGA GCCAGCCAGC |

[0234] In some embodiments, the muscle-cell cell specific promoter is a variant of the CK8 promoter, called CK8e. In some embodiments, the size of the CK8e promoter is 436 bp. The CK8e promoter has the following sequence (SEQ ID NO. 701):

| | |
|---|---|
| 1 | TGCCCATGTA AGGAGGCAAG GCCTGGGGAC ACCCGAGATG |
| | CCTGGTTATA ATTAACCCAG |
| 61 | ACATGTGGCT GCCCCCCCCC CCCCAACACC TGCTGCCTCT |
| | AAAAATAACC CTGCATGCCA |
| 121 | TGTTCCCGGC GAAGGGCCAG CTGTCCCCCG CCAGCTAGAC |
| | TCAGCACTTA GTTTAGGAAC |
| 181 | CAGTGAGCAA GTCAGCCCTT GGGGCAGCCC ATACAAGGCC |
| | ATGGGGCTGG GCAAGCTGCA |
| 241 | CGCCTGGGTC CGGGGTGGGC ACGGTGCCCG GGCAACGAGC |
| | TGAAAGCTCA TCTGCTCTCA |
| 301 | GGGGCCCCTC CCTGGGGACA GCCCCTCCTG GCTAGTCACA |
| | CCCTGTAGGC TCCTCTATAT |
| 361 | AACCCAGGGG CACAGGGGCT GCCCTCATTC TACCACCACC |
| | TCCACAGCAC AGACAGACAC |
| 421 | TCAGGAGCCA GCCAGC |

[0235] In some embodiments, the Ck8e promoter comprises a nucleotide sequence that is at least 90%, 91%, 92%, 93%, 94%, 95%, 96%, 97%, 98%, 99% or 100% identical to the sequence of SEQ ID NO: 701.

[0236] In some embodiments, the vector comprises one or more of a U6, H1, or 7SK promoter. In some embodiments, the U6 promoter is the human U6 promoter (e.g., the U6L promoter or U6S promoter). In some embodiments, the promoter is the murine U6 promoter. In some embodiments, the 7SK promoter is a human 7SK promoter. In some embodiments, the 7SK promoter is the 7SK1 promoter. In some embodiments, the 7SK promoter is the 7SK2 promoter. In some embodiments, the H1 promoter is a human H1 promoter (e.g., the H1L promoter or the HIS promoter). In some embodiments, the vector comprises multiple guide sequences, wherein each guide sequence is under the control of a separate promoter. In some embodiments, each of the multiple guide sequences comprises a different sequence. In some embodiments, each of the multiple guide sequences comprise the same sequence (e.g., each of the multiple guide sequences comprise the same spacer sequence). In some embodiments, each of the multiple guide sequences comprises the same spacer sequence and the same scaffold sequence. In some embodiments, each of the multiple guide sequences comprises different spacer sequences and different scaffold sequences. In some embodiments, each of the multiple guide sequences comprises the same spacer sequence, but comprises a different scaffold sequence. In some embodiments, each of the multiple guide sequences comprises different spacer sequences and different scaffold sequences. In some embodiments, each of the separate promoters comprises the same nucleotide sequence (e.g., the U6 promoter sequence). In some embodiments, each of the separate promoters comprises a different nucleotide sequence (e.g., the U6, H1, and/or 7SK promoter sequence).

[0237] In some embodiments, the U6 promoter comprises a nucleotide sequence that is at least 90%, 91%, 92%, 93%, 94%, 95%, 96%, 97%, 98%, 99% or 100% identical to the sequence of SEQ ID NO: 702:

| | |
|---|---|
| cgagtccaac acccgtggga atcccatggg caccatggcc cctcgctcca aaaatgcttt | 60 |
| cgcgtcgcgc agacactgct cggtagtttc ggggatcagc gtttgagtaa gagcccgcgt | 120 |
| ctgaaccctc cgcgccgccc cggccccagt ggaaagacgc gcaggcaaaa cgcaccacgt | 180 |
| gacggagcgt gaccgcgcgc cgagcgcgcg ccaaggtcgg gcaggaagag ggcctatttc | 240 |
| ccatgattcc ttcatatttg catatacgat acaaggctgt tagagagata attagaatta | 300 |
| atttgactgt aaacacaaag atattagtac aaaatacgtg acgtagaaag taataatttc | 360 |
| ttgggtagtt tgcagtttta aaattatgtt ttaaaatgga ctatcatatg cttaccgtaa | 420 |
| cttgaaagta tttcgatttc ttggctttat atatcttgtg gaaaggacga aa | 472 |

[0238] In some embodiments, the H1 promoter comprises a nucleotide sequence that is at least 90%, 91%, 92%, 93%, 94%, 95%, 96%, 97%, 98%, 99% or 100% identical to the sequence of SEQ ID NO: 703:

| | |
|---|---|
| gctcggcgcg cccatatttg catgtcgcta tgtgttctgg gaaatcacca taaacgtgaa | 60 |
| atgtctttgg atttgggaat cttataagtt ctgtatgaga ccacggta | 108 |

[0239] In some embodiments, the 7SK promoter comprises a nucleotide sequence that is at least 90%, 91%, 92%, 93%, 94%, 95%, 96%, 97%, 98%, 99% or 100% identical to the sequence of SEQ ID NO: 704:

| | |
|---|---|
| tgacggcgcg ccctgcagta tttagcatgc cccacccatc tgcaaggcat tctggatagt | 60 |
| gtcaaaacag ccggaaatca agtccgttta tctcaaactt tagcattttg ggaataaatg | 120 |
| atatttgcta tgctggttaa attagatttt agttaaattt cctgctgaag ctctagtacg | 180 |
| ataagtaact tgacctaagt gtaaagttga gatttccttc aggtttatat agcttgtgcg | 240 |
| ccgcctgggt a | 251 |

[0240] In some embodiments, the U6 promoter is a hU6c promoter and comprises a nucleotide sequence that is at least 90%, 91%, 92%, 93%, 94%, 95%, 96%, 97%, 98%, 99% or 100% identical to the sequence of SEQ ID NO: 705:

GAGGGCCTATTTCCCATGATTCCTTCATATTTGCATATACGATACAAGGC
TGTTAGAGAGATAATTGGAATTAATTTGACTGTAAACACAAAGATATTAG
TACAAAATACGTGACGTAGAAAGTAATAATTTCTTGGGTAGTTTGCAGTT
TTAAAATTATGTTTTAAAATGGACTATCATATGCTTACCGTAACTTGAAA
GTATTTCGATTTCTTGGCTTTATATATCTTGTGGAAAGGACGAAACACC.

[0241] In some embodiments, the U6 promoter is a variant of the hU6c promoter. In some embodiments, the variant of the hU6c promoter comprises alternative nucleotides as compared to the sequence of SEQ ID NO: 705. In some embodiments, the variant of the hU6c promoter comprises fewer nucleotides as compared to the 249 nucleotides of SEQ ID NO: 705. In some embodiments, the variant of the hU6c promoter has fewer nucleotides in the nucleosome binding sequence of the hU6c promoter of SEQ ID NO: 705. In some embodiments, the variant of the hU6c promoter lacks all of or at least a portion of (e.g., at least 5, 10, 15, 20, 25, or 30 nucleotides) the nucleotides corresponding to nucleotides 96-125 of SEQ ID NO: 705. In some embodiments, the variant of the hU6c promoter lacks all of or at least a portion of (e.g., at least 5, 10, 15, 20, 25, 30, 35, 40, 45, 50, 55, or 60 nucleotides) the nucleotides corresponding to nucleotides 81-140 of SEQ ID NO: 705. In some embodiments, the variant of the hU6c promoter lacks all of or at least a portion of (e.g., at least 10, 20, 30, 40, 50, 60, 65, 70, 75, 80, or 85 nucleotides) the nucleotides corresponding to nucleotides 66-150 of SEQ ID NO: 705. In some embodiments, the variant of the hU6c promoter lacks all of or at least a portion of (e.g., at least 10, 20, 30, 40, 50, 60, 70, 80, 90, 100, 110, or 120 nucleotides) the nucleotides corresponding to nucleotides 51-170 of SEQ ID NO: 705. In some embodiments, the variant of the hU6c promoter lacks the nucleotides corresponding to nucleotides 96-125 of SEQ ID NO: 705. In some embodiments, the variant of the hU6c promoter comprises 129-219 nucleotides. In some embodiments, the variant of the hU6c promoter comprises 219 nucleotides. In some embodiments, the variant of the hU6c promoter comprises 189 nucleotides. In some embodiments, the variant of the hU6c promoter comprises 159 nucleotides. In some embodiments, the variant of the hU6c promoter comprises 129 nucleotides.

[0242] In some embodiments, the U6 promoter is hU6d30 and comprises a nucleotide sequence that is at least 90%, 91%, 92%, 93%, 94%, 95%, 96%, 97%, 98%, 99% or 100% identical to the sequence of SEQ ID NO: 9001:

GAGGGCCTATTTCCCATGATTCCTTCATATTTGCATATACGATACAAGGC
TGTTAGAGAGATAATTGGAATTAATTTGACTGTAAACACAAAGATATAAT
TTCTTGGGTAGTTTGCAGTTTTAAAATTATGTTTTAAAATGGACTATCAT
ATGCTTACCGTAACTTGAAAGTATTTCGATTTCTTGGCTTTATATATCTT
GTGGAAAGGACGAAACACC.

[0243] In some embodiments, the U6 promoter is hU6d60 and comprises a nucleotide sequence that is at least 90%, 91%, 92%, 93%, 94%, 95%, 96%, 97%, 98%, 99% or 100% identical to the sequence of SEQ ID NO: 9002:

GAGGGCCTATTTCCCATGATTCCTTCATATTTGCATATACGATACAAGGC
TGTTAGAGAGATAATTGGAATTAATTTGACGTTTGCAGTTTTAAAATTAT
GTTTTAAAATGGACTATCATATGCTTACCGTAACTTGAAAGTATTTCGAT
TTCTTGGCTTTATATATCTTGTGGAAAGGACGAAACACC.

[0244] In some embodiments, the U6 promoter is hU6d90 and comprises a nucleotide sequence that is at least 90%, 91%, 92%, 93%, 94%, 95%, 96%, 97%, 98%, 99% or 100% identical to the sequence of SEQ ID NO: 9003:

GAGGGCCTATTTCCCATGATTCCTTCATATTTGCATATACGATACAAGGC
TGTTAGAGAGATAATATTATGTTTTAAAATGGACTATCATATGCTTACCG
TAACTTGAAAGTATTTCGATTTCTTGGCTTTATATATCTTGTGGAAAGGA
CGAAACACC.

[0245] In some embodiments, the U6 promoter is hU6d120 and comprises a nucleotide sequence that is at least 90%, 91%, 92%, 93%, 94%, 95%, 96%, 97%, 98%, 99% or 100% identical to the sequence of SEQ ID NO: 9004:

GAGGGCCTATTTCCCATGATTCCTTCATATTTGCATATACGATACAAGGC
GGACTATCATATGCTTACCGTAACTTGAAAGTATTTCGATTTCTTGGCTT
TATATATCTTGTGGAAAGGACGAAACACC.

[0246] In some embodiments, the 7SK promoter is a 7SK2 promoter and comprises a nucleotide sequence that is at least 90%, 91%, 92%, 93%, 94%, 95%, 96%, 97%, 98%, 99% or 100% identical to the sequence of SEQ ID NO: 706:

CTGCAGTATTTAGCATGCCCCACCCATCTGCAAGGCATTCTGGATAGTGT
CAAAACAGCCGGAAATCAAGTCCGTTTATCTCAAACTTTAGCATTTTGGG
AATAAATGATATTTGCTATGCTGGTTAAATTAGATTTTAGTTAAATTTCC
TGCTGAAGCTCTAGTACGATAAGCAACTTGACCTAAGTGTAAAGTTGAGA
CTTCCTTCAGGTTTATATAGCTTGTGCGCCGCTTGGGTACCTC.

[0247] In some embodiments, the 7SK promoter is a variant of the 7SK2 promoter. In some embodiments, the variant of the 7SK2 promoter comprises alternative nucleotides as compared to the sequence of SEQ ID NO: 706. In some embodiments, the variant of the 7SK2 promoter e.g., comprises fewer nucleotides as compared to the 243 nucleotides of SEQ ID NO: 706. In some embodiments, the variant of the 7SK2 promoter has fewer nucleotides in the nucleosome binding sequence of the 7SK2 promoter of SEQ ID NO: 706. In some embodiments, the variant of the 7SK2 promoter lacks all of or at least a portion of (e.g., at least 5, 10, 15, 20, 25, or 30 nucleotides) the nucleotides corresponding to nucleotides 95-124 of SEQ ID NO: 706. In some embodiments, the variant of the 7SK2 promoter lacks all of or at least a portion of (e.g., at least 5, 10, 15, 20, 25, 30, 35, 40, 45, 50, 55, or 60 nucleotides) the nucleotides corresponding to nucleotides 81-140 of SEQ ID NO: 706. In some embodiments, the variant of the 7SK2 promoter lacks all of or at least a portion of (e.g., at least 10, 20, 30, 40, 50, 60, 65, 70, 75, 80, 85 or 90 nucleotides) the nucleotides corresponding to nucleotides 67-156 of SEQ ID NO: 706. In some embodiments, the variant of the 7SK2 promoter lacks all of or at least a portion of (e.g., at least 10, 20, 30, 40, 50, 60, 70, 80, 90, 100, 110, or 120 nucleotides) the nucleotides corresponding to nucleotides 52-171 of SEQ ID NO: 706. In some embodiments, the variant of the 7SK2 promoter comprises 123-213 nucleotides. In some embodiments, the variant of the 7SK2 promoter comprises 213 nucleotides. In some embodiments, the variant of the 7SK2 promoter comprises 183 nucleotides. In some embodiments, the variant of the 7SK2 promoter comprises 153 nucleotides. In some embodiments, the variant of the 7SK2 promoter comprises 123 nucleotides.

[0248] In some embodiments, the 7SK promoter is 7SKd30 and comprises a nucleotide sequence that is at least 90%, 91%, 92%, 93%, 94%, 95%, 96%, 97%, 98%, 99% or 100% identical to the sequence of SEQ ID NO: 9006:

CTGCAGTATTTAGCATGCCCCACCCATCTGCAAGGCATTCTGGATAGTGT
CAAAACAGCCGGAAATCAAGTCCGTTTATCTCAAACTTTAGCATTTAAAT
TAGATTTTAGTTAAATTTCCTGCTGAAGCTCTAGTACGATAAGCAACTTG
ACCTAAGTGTAAAGTTGAGACTTCCTTCAGGTTTATATAGCTTGTGCGCC
GCTTGGGTACCTC.

[0249] In some embodiments, the 7SK promoter is 7SKd60 and comprises a nucleotide sequence that is at least 90%, 91%, 92%, 93%, 94%, 95%, 96%, 97%, 98%, 99% or 100% identical to the sequence of SEQ ID NO: 9007:

CTGCAGTATTTAGCATGCCCCACCCATCTGCAAGGCATTCTGGATAGTGT
CAAAACAGCCGGAAATCAAGTCCGTTTATCTTAAATTTCCTGCTGAAGCT
CTAGTACGATAAGCAACTTGACCTAAGTGTAAAGTTGAGACTTCCTTCAG
GTTTATATAGCTTGTGCGCCGCTTGGGTACCTC.

[0250] In some embodiments, the 7SK promoter is 7SKd90 and comprises a nucleotide sequence that is at least 90%, 91%, 92%, 93%, 94%, 95%, 96%, 97%, 98%, 99% or 100% identical to the sequence of SEQ ID NO: 9008:

CTGCAGTATTTAGCATGCCCCACCCATCTGCAAGGCATTCTGGATAGTGT
CAAAACAGCCGGAAATAGCTCTAGTACGATAAGCAACTTGACCTAAGTGT
AAAGTTGAGACTTCCTTCAGGTTTATATAGCTTGTGCGCCGCTTGGGTAC
CTC.

[0251] In some embodiments, the 7SK promoter is 7SKd120 and comprises a nucleotide sequence that is at least 90%, 91%, 92%, 93%, 94%, 95%, 96%, 97%, 98%, 99% or 100% identical to the sequence of SEQ ID NO: 9009:

[0252] CTGCAGTATTTAGCATGCCCCACCCATCTGCAAGGCATTCTGGATAGTGTCAG CAACTTGACCTAAGTGTAAAGTTGAGACTTCCTTCAGGTTTATATAGCTTGTGCGCCGCTT GGGTACCTC. In some embodiments, the H1 promoter is a HIm or mHI promoter and comprises a nucleotide sequence that is at least 90%, 91%, 92%, 93%, 94%, 95%, 96%, 97%, 98%, 99% or 100% identical to the sequence of SEQ ID NO: 707:

AATATTTGCATGTCGCTATGTGTTCTGGGAAATCACCATAAACGTGAAAT
GTCTTTGGATTTGGGAATCTTATAAGTTCTGTATGAGACCACTCTTTCC
C.

[0253] In some embodiments, the promoter is an M 11 promoter and comprises a nucleotide sequence that is at least 90%, 91%, 92%, 93%, 94%, 95%, 96%, 97%, 98%, 99% or 100% identical to the sequence of SEQ ID NO: 708:

ATATTTAGCATGTCGCTATGTGTTCTGGGAAACTTGACCTAAGTGTAAAG
TTGAGATTTCCTTCAGGTTTATATAGTTCTGTATGAGACCACTCTTTCC
C.

[0254] In some embodiments, the vector comprises multiple inverted terminal repeats (ITRs). These ITRs may be of an AAV1, AAV2, AAV3, AAV4, AAV5, AAV6, AAV7, AAV8, or AAV9 serotype. In some embodiments, the ITRs are of an AAV2 serotype. In some embodiments, the 5′ ITR comprises a sequence that is at least 80%, 85%, 90%, 91%, 92%, 93%, 94%, 95%, 96%, 97%, 98%, 99%, or 100% identical to the sequence of SEQ ID NO: 709:

GGCCACTCCCTCTCTGCGCGCTCGCTCGCTCACTGAGGCCGGGCGACCAA
AGGTCGCCCGACGCCCGGGCTTTGCCCGGGCGGCCTCAGTGAGCGAGCGA
GCGCGCAGAGAGGGAGTGGCCAACTCCATCACTAGGGGTTCCT.

[0255] In some embodiments, the 5′ ITR comprises a sequence that is at least 80%, 85%, 90%, 91%, 92%, 93%, 94%, 95%, 96%, 97%, 98%, 99%, or 100% identical to the sequence of SEQ ID NO: 939:

CGGCCACTCCCTCTCTGCGCGCTCGCTCGCTCACTGAGGCCGGGC
GACCAAAGGTCGCCCGACGCCCGGGCTTTGCCCGGGCGGCCTCAG
TGAGCGAGCGAGCGCGCAGAGAGGGAGTGGCCAACTCCATCACTA
GGGGTTCCT.

[0256] In some embodiments, the 3′ITR comprises a sequence that is at least 80%, 85%, 90%, 91%, 92%, 93%, 94%, 95%, 96%, 97%, 98%, 99%, or 100% identical to the sequence of SEQ ID NO: 710:

AGGAACCCCTAGTGATGGAGTTGGCCACTCCCTCTCTGCGCGCTC
GCTCGCTCACTGAGGCCGGGCGACCAAAGGTCGCCCGACGCCCGG
GCTTTGCCCGGGCGGCCTCAGTGAGCGAGCGAGCGCGCAGAGAGG
GA.

[0257] In some embodiments, the 3′ ITR comprises a sequence that is at least 80%, 85%, 90%, 91%, 92%, 93%, 94%, 95%, 96%, 97%, 98%, 99%, or 100% identical to the sequence of SEQ ID NO: 940:

AGGAACCCCTAGTGATGGAGTTGGCCACTCCCTCTCTGCGCGCTC
GCTCGCTCACTGAGGCCGGGCGACCAAAGGTCGCCCGACGCCCGG
GCTTTGCCCGGGCGGCCTCAGTGAGCGAGCGAGCGCGCAGAGAGG
GAA.

[0258] In some embodiments, a vector comprising a single nucleic acid molecule encoding 1) two or more guide RNA comprising any one or more of the spacer sequences of Table 6; and 2) a SaCas9 (for any one or more of SEQ ID Nos: 1-159) or SluCas9 (for any one or more of SEQ ID NO: 200-292, 924-938, or 950-955) is provided. In some embodiments, the vector is an AAV vector. In some embodiments, the AAV vector is administered to a subject to treat DMD. In some embodiments, only one vector is needed due to the use of a particular guide sequence that is useful in the context of SaCas9 or SluCas9.

[0259] In some embodiments, the vector comprises a nucleic acid encoding a Cas9 protein (e.g., an SaCas9 or SluCas9 protein) and further comprises a nucleic acid encoding one or more single guide RNA(s). In some embodiments, the nucleic acid encoding the Cas9 protein is under the control of a CK8e promoter. In some embodiments, the nucleic acid encoding the guide RNA sequence is under the control of a hU6c promoter. In some embodiments, the vector is AAV9.

[0260] In some embodiments, the vector comprises multiple nucleic acids encoding more than one guide RNA. In some embodiments, the vector comprises two nucleic acids encoding two different guide RNA sequences.

[0261] In some embodiments, the vector comprises a nucleic acid encoding a Cas9 protein (e.g., an SaCas9 protein or SluCas9 protein), a nucleic acid encoding a first guide RNA, and a nucleic acid encoding a second guide RNA. In some embodiments, the vector does not comprise a nucleic acid encoding more than two guide RNAs. In some embodiments, the nucleic acid encoding the first guide RNA is the same as the nucleic acid encoding the second guide RNA. In some embodiments, the nucleic acid encoding the first guide RNA is different from the nucleic acid encoding the second guide RNA. In some embodiments, the vector comprises a single nucleic acid molecule, wherein the single nucleic acid molecule comprises a nucleic acid encoding a Cas9 protein, a nucleic acid encoding a first guide RNA, and a nucleic acid that is the reverse complement to the coding sequence for the second guide RNA. In some embodiments, the vector comprises a single nucleic acid molecule, wherein the single nucleic acid molecule comprises a nucleic acid encoding a Cas9 protein, a nucleic acid that is the reverse complement to the coding sequence for the first guide RNA, and a nucleic acid that is the reverse complement to the coding sequence for the second guide RNA. In some embodiments, the nucleic acid encoding a Cas9 protein (e.g., an SaCas9 or SluCas9 protein) is under the control of the CK8e promoter. In some embodiments, the first guide is under the control of the hU6c promoter and the second guide is under the control of the hU6c promoter. In some embodiments, the first guide is under the control of the 7SK2 promoter, and the second guide is under the control of the H1m promoter. In some embodiments, the first guide is under the control of the H1m promoter, and the second guide is under the control of the 7SK2 promoter. In some embodiments, the first guide is under the control of the hU6c promoter, and the second guide is under the control of the H1m promoter. In some embodiments, the first guide is under the control of the H1m promoter, and the second guide is under the control of the hU6c promoter. In some embodiments, the nucleic acid encoding the Cas9 protein is: a) between the nucleic acids encoding the guide RNAs, b) between the nucleic acids that are the reverse complement to the coding sequences for the guide RNAs, c) between the nucleic acid encoding the first guide RNA and the nucleic acid that is the reverse complement to the coding sequence for the second guide RNA, d) between the nucleic acid encoding the second guide RNA and the nucleic acid that is the reverse complement to the coding sequence for the first guide RNA, e) 5′ to the nucleic acids encoding the guide RNAs, f) 5′ to the nucleic acids that are the reverse complements to the coding sequences for the guide RNAs, g) 5′ to a nucleic acid encoding one of the guide RNAs and 5′ to a nucleic acid that is the reverse complement to the coding sequence for the other guide RNA, h) 3′ to the nucleic acids encoding the guide RNAs, i) 3′ to the nucleic acids that are the reverse complements to the coding sequences for the guide RNAs, or j) 3′ to a nucleic acid encoding one of the guide RNAs and 3′ to a nucleic acid that is the reverse complement to the coding sequence for the other guide RNA. In some embodiments, any of the vectors disclosed herein is AAV9. In preferred embodiments, the AAV9 vector is less than 5 kb from ITR to ITR in size, inclusive of both ITRs. In particular embodiments, the AAV9 vector is less than 4.9 kb from ITR to ITR in size, inclusive of both ITRs. In further embodiments, the AAV9 vector is less than 4.85 kb from ITR to ITR in size, inclusive of both ITRs. In further embodiments, the AAV9 vector is less than 4.8 kb from ITR to ITR in size, inclusive of both ITRs. In further embodiments, the AAV9 vector is less than 4.75 kb from ITR to ITR in size, inclusive of both ITRs. In further embodiments, the AAV9 vector is less than 4.7 kb from ITR to ITR in size, inclusive of both ITRs. In some embodiments, the vector is between 3.9-5 kb, 4-5 kb, 4.2-5 kb, 4.4-5 kb, 4.6-5 kb, 4.7-5 kb, 3.9-4.9 kb, 4.2-4.9 kb, 4.4-4.9 kb, 4.7-4.9 kb, 3.9-4.85 kb, 4.2-4.85 kb, 4.4-4.85 kb, 4.6-4.85 kb, 4.7-4.85 kb, 4.7-4.9 kb, 3.9-4.8 kb, 4.2-4.8 kb, 4.4-4.8 kb or 4.6-4.8 kb from ITR to ITR in size, inclusive of both ITRs. In some embodiments, the vector is between 4.4-4.85 kb from ITR to ITR in size, inclusive of both ITRs. In some embodiments, the vector is an AAV9 vector.

[0262] In some embodiments, any of the vectors disclosed herein comprises a nucleic acid encoding at least a first guide RNA and a second guide RNA. In some embodiments, the nucleic acid comprises a spacer-encoding sequence for the first guide RNA, a scaffold-encoding sequence for the first guide RNA, a spacer-encoding sequence for the second guide RNA, and a scaffold-encoding sequence of the second guide RNA. In some embodiments, the spacer-encoding sequence (e.g., encoding any of the spacer sequences disclosed herein) for the first guide RNA is identical to the spacer-encoding sequence for the second guide RNA. In some embodiments, the spacer-encoding sequence (e.g., encoding any of the spacer sequences disclosed herein) for the first guide RNA is different from the spacer-encoding sequence for the second guide RNA. In some embodiments, the scaffold-encoding sequence for the first guide RNA is identical to the scaffold-encoding sequence for the second guide RNA. In some embodiments, the scaffold-encoding sequence for the first guide RNA is different from the scaffold-encoding sequence for the nucleic acid encoding the second guide RNA. In some embodiments, the scaffold-encoding sequence for the first guide RNA comprises a sequence selected from the group consisting of SEQ ID Nos: 500-504 (for SaCas9) and 601 or 900-917 (for SluCas9), and the scaffold-encoding sequence for the second guide RNA comprises a different sequence selected from the group consisting of SEQ ID Nos: 500-504 (for SaCas9) and 601 or 900-917 (for SluCas9). In some embodiments, the scaffold-encoding sequence for the first guide RNA comprises the sequence of SEQ ID NO: 500, and the scaffold-encoding sequence for the second guide RNA comprises the sequence of SEQ ID NO: 501. In some embodiments, the scaffold-encoding sequence for the first guide RNA comprises the sequence of SEQ ID NO: 500, and the scaffold-encoding sequence for the second guide RNA comprises the sequence of SEQ ID NO: 502. In some embodiments, the scaffold-encoding sequence for the first guide RNA comprises the sequence of SEQ ID NO: 500, and the scaffold-encoding sequence for the second guide RNA comprises the sequence of SEQ ID NO: 503. In some embodiments, the scaffold-encoding sequence for the first guide RNA comprises the sequence of SEQ ID NO: 500, and the scaffold-encoding sequence for the second guide RNA comprises the sequence of SEQ ID NO: 504. In some embodiments, the scaffold-encoding sequence for the first guide RNA comprises the sequence of SEQ ID NO: 501, and the scaffold-encoding sequence for the second guide RNA comprises the sequence of SEQ ID NO: 502. In some embodiments, the scaffold-encoding sequence for the first guide RNA comprises the sequence of SEQ ID NO: 501, and the scaffold-encoding sequence for the second guide RNA comprises the sequence of SEQ ID NO: 503. In some embodiments, the scaffold-encoding sequence for the first guide RNA comprises the sequence of SEQ ID NO: 501, and the scaffold-encoding sequence for the second guide RNA comprises the sequence of SEQ ID NO: 504. In some embodiments, the scaffold-encoding sequence for the first guide RNA comprises the sequence of SEQ ID NO: 502, and the scaffold-encoding sequence for the second guide RNA comprises the sequence of SEQ ID NO: 503. In some embodiments, the scaffold-encoding sequence for the first guide RNA comprises the sequence of SEQ ID NO: 502, and the scaffold-encoding sequence for the second guide RNA comprises the sequence of SEQ ID NO: 504. In some embodiments, the scaffold-encoding sequence for the first guide RNA comprises the sequence of SEQ ID NO: 503, and the scaffold-encoding sequence for the second guide RNA comprises the sequence of SEQ ID NO: 504. In particular embodiments, the scaffold-encoding sequence for the first guide RNA comprises the sequence of SEQ ID NO: 504, and the scaffold-encoding sequence for the second guide RNA comprises the sequence of SEQ ID NO: 504. In some embodiments, the scaffold-encoding sequence for the first guide RNA comprises the sequence of SEQ ID NO: 600, and the scaffold-encoding sequence for the second guide RNA comprises the sequence of SEQ ID NO: 900. In some embodiments, the scaffold-encoding sequence for the first guide RNA comprises the sequence of SEQ ID NO: 600, and the scaffold-encoding sequence for the second guide RNA comprises the sequence of SEQ ID NO: 901. In some embodiments, the scaffold-encoding sequence for the first guide RNA comprises the sequence of SEQ ID NO: 600, and the scaffold-encoding sequence for the second guide RNA comprises the sequence of SEQ ID NO: 902. In some embodiments, the scaffold-encoding sequence for the first guide RNA comprises the sequence of SEQ ID NO: 600, and the scaffold-encoding sequence for the second guide RNA comprises the sequence of SEQ ID NO: 903. In some embodiments, the scaffold-encoding sequence for the first guide RNA comprises the sequence of SEQ ID NO: 600, and the scaffold-encoding sequence for the second guide RNA comprises the sequence of SEQ ID NO: 904. In some embodiments, the scaffold-encoding sequence for the first guide RNA comprises the sequence of SEQ ID NO: 600, and the scaffold-encoding sequence for the second guide RNA comprises the sequence of SEQ ID NO: 905. In some embodiments, the scaffold-encoding sequence for the first guide RNA comprises the sequence of SEQ ID NO: 600, and the scaffold-encoding sequence for the second guide RNA comprises the sequence of SEQ ID NO: 906. In some embodiments, the scaffold-encoding sequence for the first guide RNA comprises the sequence of SEQ ID NO: 600, and the scaffold-encoding sequence for the second guide RNA comprises the sequence of SEQ ID NO: 907. In some embodiments, the scaffold-encoding sequence for the first guide RNA comprises the sequence of SEQ ID NO: 600, and the scaffold-encoding sequence for the second guide RNA comprises the sequence of SEQ ID NO: 908. In some embodiments, the scaffold-encoding sequence for the first guide RNA comprises the sequence of SEQ ID NO: 600, and the scaffold-encoding sequence for the second guide RNA comprises the sequence of SEQ ID NO: 909. In some embodiments, the scaffold-encoding sequence for the first guide RNA comprises the sequence of SEQ ID NO: 600, and the scaffold-encoding sequence for the second guide RNA comprises the sequence of SEQ ID NO: 910. In some embodiments, the scaffold-encoding sequence for the first guide RNA comprises the sequence of SEQ ID NO: 600, and the scaffold-encoding sequence for the second guide RNA comprises the sequence of SEQ ID NO: 911. In some embodiments, the scaffold-encoding sequence for the first guide RNA comprises the sequence of SEQ ID NO: 600, and the scaffold-encoding sequence for the second guide RNA comprises the sequence of SEQ ID NO: 912. In some embodiments, the scaffold-encoding sequence for the first guide RNA comprises the sequence of SEQ ID NO: 600, and the scaffold-encoding sequence for the second guide RNA comprises the sequence of SEQ ID NO: 913. In some embodiments, the scaffold-encoding sequence for the first guide RNA comprises the sequence of SEQ ID NO: 600, and the scaffold-encoding sequence for the second guide RNA comprises the sequence of SEQ ID NO: 914. In some embodiments, the scaffold-encoding sequence for the first guide RNA comprises the sequence of SEQ ID NO: 600, and the scaffold-encoding sequence for the second guide RNA comprises the sequence of SEQ ID NO: 915. In some embodiments, the scaffold-encoding sequence for the first guide RNA comprises the sequence of SEQ ID NO: 600, and the scaffold-encoding sequence for the second guide RNA comprises the sequence of SEQ ID NO: 916. In some embodiments, the scaffold-encoding sequence for the first guide RNA comprises the sequence of SEQ ID NO: 600, and the scaffold-encoding sequence for the second guide RNA comprises the sequence of SEQ ID NO: 917. In some embodiments, the scaffold-encoding sequence for the first guide RNA comprises the sequence of SEQ ID NO: 901, and the scaffold-encoding sequence for the second guide RNA comprises the sequence of SEQ ID NO: 902. In some embodiments, the scaffold-encoding sequence for the first guide RNA comprises the sequence of SEQ ID NO: 901, and the scaffold-encoding sequence for the second guide RNA comprises the sequence of SEQ ID NO: 903. In some embodiments, the scaffold-encoding sequence for the first guide RNA comprises the sequence of SEQ ID NO: 901, and the scaffold-encoding sequence for the second guide RNA comprises the sequence of SEQ ID NO: 904. In some embodiments, the scaffold-encoding sequence for the first guide RNA comprises the sequence of SEQ ID NO: 901, and the scaffold-encoding sequence for the second guide RNA comprises the sequence of SEQ ID NO: 905. In some embodiments, the scaffold-encoding sequence for the first guide RNA comprises the sequence of SEQ ID NO: 901, and the scaffold-encoding sequence for the second guide RNA comprises the sequence of SEQ ID NO: 906. In some embodiments, the scaffold-encoding sequence for the first guide RNA comprises the sequence of SEQ ID NO: 901, and the scaffold-encoding sequence for the second guide RNA comprises the sequence of SEQ ID NO: 907. In some embodiments, the scaffold-encoding sequence for the first guide RNA comprises the sequence of SEQ ID NO: 901, and the scaffold-encoding sequence for the second guide RNA comprises the sequence of SEQ ID NO: 908. In some embodiments, the scaffold-encoding sequence for the first guide RNA comprises the sequence of SEQ ID NO: 901, and the scaffold-encoding sequence for the second guide RNA comprises the sequence of SEQ ID NO: 909. In some embodiments, the scaffold-encoding sequence for the first guide RNA comprises the sequence of SEQ ID NO: 901, and the scaffold-encoding sequence for the second guide RNA comprises the sequence of SEQ ID NO: 910. In some embodiments, the scaffold-encoding sequence for the first guide RNA comprises the sequence of SEQ ID NO: 901, and the scaffold-encoding sequence for the second guide RNA comprises the sequence of SEQ ID NO: 911. In some embodiments, the scaffold-encoding sequence for the first guide RNA comprises the sequence of SEQ ID NO: 901, and the scaffold-encoding sequence for the second guide RNA comprises the sequence of SEQ ID NO: 912. In some embodiments, the scaffold-encoding sequence for the first guide RNA comprises the sequence of SEQ ID NO: 901, and the scaffold-encoding sequence for the second guide RNA comprises the sequence of SEQ ID NO: 913. In some embodiments, the scaffold-encoding sequence for the first guide RNA comprises the sequence of SEQ ID NO: 901, and the scaffold-encoding sequence for the second guide RNA comprises the sequence of SEQ ID NO: 914. In some embodiments, the scaffold-encoding sequence for the first guide RNA comprises the sequence of SEQ ID NO: 901, and the scaffold-encoding sequence for the second guide RNA comprises the sequence of SEQ ID NO: 915. In some embodiments, the scaffold-encoding sequence for the first guide RNA comprises the sequence of SEQ ID NO: 901, and the scaffold-encoding sequence for the second guide RNA comprises the sequence of SEQ ID NO: 916. In some embodiments, the scaffold-encoding sequence for the first guide RNA comprises the sequence of SEQ ID NO: 901, and the scaffold-encoding sequence for the second guide RNA comprises the sequence of SEQ ID NO: 917. In particular embodiments, the scaffold-encoding sequence for the first guide RNA comprises the sequence of SEQ ID NO: 901, and the scaffold-encoding sequence for the second guide RNA comprises the sequence of SEQ ID NO: 901. In some embodiments, the spacer encoding sequence for the first guide RNA is the same as the spacer-encoding sequence in the second guide RNA, and the scaffold-encoding sequence for the first guide RNA is different from the scaffold-encoding sequence in the nucleic acid encoding the second guide RNA.

[0263] In some embodiments, the AAV vector is in a particular configuration. Some examples of these AAV vector configurations are provided herein, and the order of elements in these exemplary vectors are referenced in a 5′ to 3′ manner with respect to the plus strand. For these configurations, it should be understood that the recited elements may not be directly contiguous, and that one or more nucleotides or one or more additional elements may be present between the recited elements. However, in some embodiments, it is possible that no nucleotides or no additional elements are present between the recited elements. Also, unless otherwise stated, “a promoter for expression of element X” means that the promoter is oriented in a manner to facilitate expression of the recited element X. In addition, unless otherwise stated, references to an “sgRNA scaffold sequence” or “a guide RNA scaffold sequence” are synonymous with “a nucleotide sequence/nucleic acid encoding an sgRNA scaffold sequence” or “a nucleotide sequence/nucleic acid encoding a guide RNA scaffold sequence.” In some embodiments, the disclosure provides for a nucleic acid encoding an SaCas9 (e.g., an SaCas9-KKH) or SluCas9. In some embodiments, the nucleic acid encodes for one or more nuclear localization signals (e.g., the SV40 NLS and/or the c-Myc NLS) on the C-terminus of the encoded SaCas9 or SluCas9. In some embodiments, the nucleic acid encodes for one or more NLSs (e.g., the SV40 NLS and/or the c-Myc NLS) on the C-terminus of the encoded SaCas9 or SluCas9, and the nucleic acid does not encode for an NLS on the N-terminus of the encoded SaCas9 or SluCas9. In some embodiments, the nucleic acid encodes for one or more nuclear localization signals (e.g., the SV40 NLS and/or the c-Myc NLS) on the N-terminus of the encoded SaCas9 or SluCas9. In some embodiments, the nucleic acid encodes for one or more NLSs (e.g., the SV40 NLS and/or the c-Myc NLS) on the N-terminus of the encoded SaCas9 or SluCas9, and the nucleic acid does not encode for an NLS on the C-terminus of the encoded SaCas9 or SluCas9. In some embodiments, the nucleic acid encodes for one or more nuclear localization signals (e.g., the SV40 NLS and/or the c-Myc NLS) on the C-terminus of the encoded SaCas9 or SluCas9 and also encodes for one or more NLSs on the N-terminus of the encoded SaCas9 or SluCas9 (e.g., the SV40 NLS and/or the c-Myc NLS). In some embodiments, the nucleic acid encodes one NLS. In some embodiments, the nucleic acid encodes two NLSs. In some embodiments, the nucleic acid encodes three NLSs. The one, two, or three NLS may all be C-terminal, N-terminal, or any combination of C- and N-terminal. The NLS may be fused/attached directly to the C- or N-terminus or to another NLS, or may be fused/attached indirectly attached through a linker. In some embodiments, an additional domain may be: a) fused to the N- or C-terminus of the Cas protein (e.g., a Cas9 protein), b) fused to the N-terminus of an NLS fused to the N-terminus of a Cas protein, or c) fused to the C-terminus of an NLS fused to the C-terminus of a Cas protein, with or without a linker. In some embodiments, an NLS is fused to the N- and/or C-terminus of the Cas protein by means of a linker. In some embodiments, an NLS is fused to the N-terminus of an N-terminally-fused NLS on a Cas protein by means of a linker, and/or an NLS is fused to the C-terminus of a C-terminally fused NLS on a Cas protein by means of a linker. In some embodiments, the linker is GSVD (SEQ ID NO: 550) or GSGS (SEQ ID NO: 551). In some embodiments, the Cas protein comprises a c-Myc NLS fused to the N-terminus of the Cas protein (or to an N-terminally-fused NLS on the Cas protein), optionally by means of a linker. In some embodiments, the Cas protein comprises an SV40 NLS fused to the C-terminus of the Cas protein (or to a C-terminally-fused NLS on the Cas protein), optionally by means of a linker. In some embodiments, the Cas protein comprises a nucleoplasmin NLS fused to the C-terminus of the Cas protein (or to a C-terminally-fused NLS on the Cas protein), optionally by means of a linker. In some embodiments, the Cas protein comprises: a) a c-Myc NLS fused to the N-terminus of the Cas protein, optionally by means of a linker, b) an SV40 NLS fused to the C-terminus of the Cas protein, optionally by means of a linker, and c) a nucleoplasmin NLS fused to the C-terminus of the SV40 NLS, optionally by means of a linker. In some embodiments, the Cas protein comprises: a) a c-Myc NLS fused to the N-terminus of the Cas protein, optionally by means of a linker, b) a nucleoplasmin NLS fused to the C-terminus of the Cas protein, optionally by means of a linker, and c) an SV40 NLS fused to the C-terminus of the nucleoplasmin NLS, optionally by means of a linker. In some embodiments, a c-myc NLS is fused to the N-terminus of the Cas and an SV40 NLS and/or nucleoplasmin NLS is fused to the C-terminus of the Cas. In some embodiments, a c-myc NLS is fused to the N-terminus of the Cas (e.g., by means of a linker such as GSVD), an SV40 NLS is fused to the C-terminus of the Cas (e.g., by means of a linker such as GSGS), and a nucleoplasmin NLS is fused to the C-terminus of the SV-40 NLS (e.g., by means of a linker such as GSGS).

[0264] In some embodiments, the AAV vector comprises from 5′ to 3′ with respect to the plus strand: the reverse complement of a first sgRNA scaffold sequence, the reverse complement of a nucleic acid encoding a first sgRNA guide sequence, the reverse complement of a promoter for expression of the nucleic acid encoding the first sgRNA, a promoter for expression of a nucleic acid encoding SaCas9 (e.g., CK8e), a nucleic acid encoding SaCas9, a polyadenylation sequence, a promoter for expression of a second sgRNA, a second sgRNA guide sequence, and a second sgRNA scaffold sequence. In some embodiments, the first sgRNA is associated with weaker expression than the second sgRNA when compared individually in a sgRNA expression assay, e.g., in an assay in which each guide is separately assessed (i.e., not in the same construct) using the same promoter, same concentration of genetic material/vector/RNP in substantially the same conditions (e.g., time, pH, temperature, buffer conditions). In some embodiments the promoter for expression of the nucleic acid encoding the first sgRNA is any of the hU6c promoters disclosed herein. In some embodiments the promoter for expression of the nucleic acid encoding the first sgRNA comprises SEQ ID NO: 705. In some embodiments the promoter for expression of the nucleic acid encoding the first sgRNA comprises SEQ ID NO: 9001. In some embodiments the promoter for expression of the nucleic acid encoding the first sgRNA comprises SEQ ID NO: 9002. In some embodiments the promoter for expression of the nucleic acid encoding the first sgRNA comprises SEQ ID NO: 9003. In some embodiments the promoter for expression of the nucleic acid encoding the first sgRNA comprises SEQ ID NO: 9004. In some embodiments the promoter for expression of the nucleic acid encoding the first sgRNA is any of the 7SK2 promoters disclosed herein. In some embodiments the promoter for expression of the nucleic acid encoding the first sgRNA comprises SEQ ID NO: 705. In some embodiments the promoter for expression of the nucleic acid encoding the first sgRNA comprises SEQ ID NO: 9006. In some embodiments the promoter for expression of the nucleic acid encoding the first sgRNA comprises SEQ ID NO: 9007. In some embodiments the promoter for expression of the nucleic acid encoding the first sgRNA comprises SEQ ID NO: 9008. In some embodiments the promoter for expression of the nucleic acid encoding the first sgRNA comprises SEQ ID NO: 9009. In some embodiments the promoter for expression of the nucleic acid encoding the second sgRNA is any of the hU6c promoters disclosed herein. In some embodiments the promoter for expression of the nucleic acid encoding the second sgRNA comprises SEQ ID NO: 705. In some embodiments the promoter for expression of the nucleic acid encoding the second sgRNA comprises SEQ ID NO: 9001. In some embodiments the promoter for expression of the nucleic acid encoding the second sgRNA comprises SEQ ID NO: 9002. In some embodiments the promoter for expression of the nucleic acid encoding the second sgRNA comprises SEQ ID NO: 9003. In some embodiments the promoter for expression of the nucleic acid encoding the second sgRNA comprises SEQ ID NO: 9004. In some embodiments the promoter for expression of the nucleic acid encoding the second sgRNA is any of the 7SK2 promoters disclosed herein. In some embodiments the promoter for expression of the nucleic acid encoding the second sgRNA comprises SEQ ID NO: 705. In some embodiments the promoter for expression of the nucleic acid encoding the second sgRNA comprises SEQ ID NO: 9006. In some embodiments the promoter for expression of the nucleic acid encoding the second sgRNA comprises SEQ ID NO: 9007. In some embodiments the promoter for expression of the nucleic acid encoding the second sgRNA comprises SEQ ID NO: 9008. In some embodiments the promoter for expression of the nucleic acid encoding the second sgRNA comprises SEQ ID NO: 9009. In some embodiments the promoter for expression of the nucleic acid encoding the second sgRNA is any of the H1m promoters disclosed herein. In some embodiments, the promoter for SaCas9 is the CK8e promoter. In some embodiments, the nucleic acid sequence encoding SaCas9 is fused to a nucleic acid sequence encoding a nuclear localization sequence (NLS). In some embodiments, the nucleic acid sequence encoding SaCas9 is fused to two nucleic acid sequences each encoding a nuclear localization sequence (NLS). In some embodiments, the nucleic acid sequence encoding SaCas9 is fused to three nucleic acid sequences each encoding a nuclear localization sequence (NLS). In some embodiments, the one or more NLSs is an SV40 NLS. In some embodiments, the one or more NLSs is a c-Myc NLS. In some embodiments, the one or more NLSs is a nucleoplasmin NLS. In some embodiments, the NLS is fused to the SaCas9 with a linker.

[0265] In some embodiments, the AAV vector comprises from 5′ to 3′ with respect to the plus strand: the reverse complement of a first sgRNA scaffold sequence, the reverse complement of a nucleic acid encoding a first sgRNA guide sequence, the reverse complement of an hU6c promoter for expression of the nucleic acid encoding the first sgRNA, a promoter for expression of a nucleic acid encoding SaCas9 (e.g., CK8e), a nucleic acid encoding SaCas9, a polyadenylation sequence, an hU6c promoter for expression of a second sgRNA, a second sgRNA guide sequence, and a second sgRNA scaffold sequence. In some embodiments, the first sgRNA and the second sgRNA are selected from Table 6. In some embodiments, the nucleic acid sequence encoding SaCas9 is fused to a nucleic acid sequence encoding a nuclear localization sequence (NLS). In some embodiments, the nucleic acid sequence encoding SaCas9 is fused to two nucleic acid sequences each encoding a nuclear localization sequence (NLS). In some embodiments, the nucleic acid sequence encoding SaCas9 is fused to three nucleic acid sequences each encoding a nuclear localization sequence (NLS). In some embodiments, the one or more NLSs is an SV40 NLS. In some embodiments, the one or more NLSs is a c-Myc NLS. In some embodiments, the NLS is fused to the SaCas9 with a linker.

[0266] In some embodiments, the AAV vector comprises from 5′ to 3′ with respect to the plus strand: the reverse complement of a first sgRNA scaffold sequence, the reverse complement of a nucleic acid encoding a first sgRNA guide sequence, the reverse complement of an hU6c promoter for expression of the nucleic acid encoding the first sgRNA, a promoter for expression of a nucleic acid encoding SaCas9 (e.g., CK8e), a nucleic acid encoding SaCas9, a polyadenylation sequence, an 7SK promoter for expression of a second sgRNA, a second sgRNA guide sequence, and a second sgRNA scaffold sequence. In some embodiments, the first sgRNA and the second sgRNA are selected from Table 6. In some embodiments, the nucleic acid sequence encoding SaCas9 is fused to a nucleic acid sequence encoding a nuclear localization sequence (NLS). In some embodiments, the nucleic acid sequence encoding SaCas9 is fused to two nucleic acid sequences each encoding a nuclear localization sequence (NLS). In some embodiments, the nucleic acid sequence encoding SaCas9 is fused to three nucleic acid sequences each encoding a nuclear localization sequence (NLS). In some embodiments, the one or more NLSs is an SV40 NLS. In some embodiments, the one or more NLSs is a c-Myc NLS. In some embodiments, the NLS is fused to the SaCas9 with a linker.

[0267] In some embodiments, the AAV vector comprises from 5′ to 3′ with respect to the plus strand: the reverse complement of a first sgRNA scaffold sequence, the reverse complement of a nucleic acid encoding a first sgRNA guide sequence, the reverse complement of an hU6c promoter for expression of the nucleic acid encoding the first sgRNA, a promoter for expression of a nucleic acid encoding Cas9 (e.g., CK8e), a nucleic acid encoding Cas9, a polyadenylation sequence, an H1m promoter for expression of a second sgRNA, a second sgRNA guide sequence, and a second sgRNA scaffold sequence. In some embodiments, the first sgRNA and the second sgRNA are selected from Table 6. In some embodiments, the nucleic acid sequence encoding Cas9 is fused to a nucleic acid sequence encoding a nuclear localization sequence (NLS). In some embodiments, the nucleic acid sequence encoding Cas9 is fused to two nucleic acid sequences each encoding a nuclear localization sequence (NLS). In some embodiments, the nucleic acid sequence encoding Cas9 is fused to three nucleic acid sequences each encoding a nuclear localization sequence (NLS). In some embodiments, the one or more NLSs is an SV40 NLS. In some embodiments, the one or more NLSs is a c-Myc NLS. In some embodiments, the NLS is fused to the Cas9 with a linker.

[0268] In some embodiments, the AAV vector comprises from 5′ to 3′ with respect to the plus strand: the reverse complement of a first sgRNA scaffold sequence, the reverse complement of a nucleic acid encoding a first sgRNA guide sequence, the reverse complement of an 7SK promoter for expression of the nucleic acid encoding the first sgRNA, a promoter for expression of a nucleic acid encoding Cas9 (e.g., CK8e), a nucleic acid encoding Cas9, a polyadenylation sequence, an H1m promoter for expression of a second sgRNA, a second sgRNA guide sequence, and a second sgRNA scaffold sequence. In some embodiments, the first sgRNA and the second sgRNA are selected from Table 6. In some embodiments, the nucleic acid sequence encoding Cas9 is fused to a nucleic acid sequence encoding a nuclear localization sequence (NLS). In some embodiments, the nucleic acid sequence encoding Cas9 is fused to two nucleic acid sequences each encoding a nuclear localization sequence (NLS). In some embodiments, the nucleic acid sequence encoding Cas9 is fused to three nucleic acid sequences each encoding a nuclear localization sequence (NLS). In some embodiments, the one or more NLSs is an SV40 NLS. In some embodiments, the one or more NLSs is a c-Myc NLS. In some embodiments, the NLS is fused to the Cas9 with a linker.

[0269] In some embodiments, the disclosure provides for a composition comprising at least two nucleic acids. In some embodiments, the composition comprises at least two nucleic acid molecules, wherein the first nucleic acid molecule comprises a sequence encoding any of the endonucleases disclosed herein (e.g., a SaCas9, SluCas9, or a sRGN), wherein the second nucleic acid molecule encodes a first guide RNA and a second guide RNA, wherein the first guide RNA and the second guide RNA are not the same sequence, and wherein the second nucleic acid molecule does not encode an endonuclease. In some embodiments, the first nucleic acid molecule also encodes a copy of the first guide RNA and a copy of the second guide RNA. In some embodiments, the first nucleic acid molecule does not encode any guide RNAs. In some embodiments, the second nucleic acid molecule encodes two copies of the first guide RNA and two copies of the second guide RNA. In some embodiments, the second nucleic molecule encodes two copies of the first guide RNA, and one copy of the second guide RNA. In some embodiments, the second nucleic acid molecule encodes one copy of the first guide RNA, and two copies of the second guide RNA. In some embodiments, the second nucleic acid molecule comprises two copies of the first guide RNA, and three copies of the second guide RNA. In some embodiments, the second nucleic acid molecule comprises three copies of the first guide RNA, and two copies of the second guide RNA. In some embodiments, the second nucleic acid does not encode a Cas protein. In some embodiments, the second nucleic acid molecule encodes three copies of the first guide RNA and three copies of the second guide RNA. In some embodiments, the first nucleic acid molecule comprises from 5′ to 3′ with respect to the plus strand: the reverse complement of a first guide RNA scaffold sequence, the reverse complement of a nucleotide sequence encoding the first guide RNA sequence, the reverse complement of a promoter for expression of the nucleotide sequence encoding the first guide RNA sequence, a promoter for expression of a nucleotide sequence encoding the endonuclease, a nucleotide sequence encoding an endonuclease, a polyadenylation sequence, a promoter for expression of the second guide RNA in the same direction as the promoter for the endonuclease, the second guide RNA sequence, and a second guide RNA scaffold sequence. In some embodiments, the promoter for expression of the nucleotide sequence encoding the first guide RNA sequence in the first nucleic acid molecule is a U6 promoter and the promoter for expression of the nucleotide sequence encoding the second guide RNA in the first nucleic acid molecule is a U6 promoter.

[0270] In some embodiments, the AAV vector comprises from 5′ to 3′ with respect to the plus strand: a promoter for expression of a nucleic acid encoding a first sgRNA, a nucleic acid encoding the first sgRNA guide sequence, the first sgRNA scaffold sequence, a promoter for expression of Cas9 (e.g., CK8e), a nucleic acid encoding Cas9, a polyadenylation sequence, a promoter for expression of a second sgRNA, the second sgRNA guide sequence, and a second sgRNA scaffold sequence. See FIG. 5A at “Design 1”.

[0271] In some embodiments, the AAV vector comprises from 5′ to 3′ with respect to the plus strand: the reverse complement of a first sgRNA scaffold sequence, the reverse complement of a nucleic acid encoding a first sgRNA guide sequence, the reverse complement of a promoter for expression of the nucleic acid encoding the first sgRNA, a promoter for expression of a nucleic acid encoding Cas9 (e.g., CK8e), a nucleic acid encoding Cas9, a polyadenylation sequence, a promoter for expression of a second sgRNA, a second sgRNA guide sequence, and a second sgRNA scaffold sequence. See FIG. 5A at “Design 2”.

[0272] In some embodiments, the AAV vector comprises from 5′ to 3′ with respect to the plus strand: a promoter for expression of a nucleic acid encoding a first sgRNA, a nucleic acid encoding the first sgRNA guide sequence, a first sgRNA scaffold sequence, a promoter for expression of a second sgRNA, a second sgRNA guide sequence, and a second sgRNA scaffold sequence, a promoter for Cas9 (e.g., CK8e), a nucleic acid encoding Cas9, and a polyadenylation sequence. See FIG. 5A at “Design 3”.

[0273] In some embodiments, the AAV vector comprises from 5′ to 3′ with respect to the plus strand: a promoter for expression of a nucleic acid encoding Cas9 (e.g., CK8e), a nucleic acid encoding Cas9, a polyadenylation sequence, a promoter for expression of the nucleic acid encoding a first guide RNA, a nucleic acid encoding the first sgRNA guide sequence, a first sgRNA scaffold sequence, a promoter for expression of the second sgRNA, a second sgRNA guide sequence, and a second sgRNA scaffold sequence. See FIG. 5A at “Design 4”.

[0274] In some embodiments, the AAV vector comprises from 5′ to 3′ with respect to the plus strand: a first sgRNA scaffold sequence (e.g., V5), a nucleic acid encoding a first sgRNA guide sequence (e.g., Slu3 or Slu7), a promoter (e.g., U6) for expression of the nucleic acid encoding the first sgRNA guide sequence, a promoter (e.g., CK8e) for expression (in the opposite direction of expression of the nucleic acid encoding the first sgRNA guide sequence) of a nucleic acid encoding a SluCas9, a nucleic acid encoding a first NLS, a nucleic acid encoding a SluCas9, a nucleic acid encoding a second NLS, a nucleic acid encoding a third NLS, a promoter (e.g., U6) for expression (in the same direction as expression of the nucleic acid encoding the SluCas9) of a second sgRNA guide sequence (e.g., Slu 7 or Slu 3), a nucleic acid encoding the second sgRNA guide sequence, and a second sgRNA scaffold sequence (e.g., V5). See FIG. 5B at “Design 5” and “Design 6”. Designs 5 and 6 are specific versions of Design 2, as described herein.

[0275] In a particular embodiment, the AAV vector comprises from 5′ to 3′ with respect to the plus strand: the reverse complement of a first V5 scaffold sequence, the reverse complement of a nucleic acid encoding a Slu3 guide RNA sequence selected from SEQ ID NOs: 217 or 950-955, the reverse complement of a U6 promoter for expression of the nucleic acid encoding the Slu3 guide RNA sequence, a CK8e promoter for expression (in the opposite direction of expression of the nucleic acid encoding the Slu3 sgRNA guide sequence) of a nucleic acid encoding a SluCas9, a nucleic acid encoding a c-Myc NLS, a nucleic acid encoding a SluCas9, a nucleic acid encoding a SV40 NLS, a nucleic acid encoding a NP NLS, a U6 promoter for expression (in the same direction as expression of the nucleic acid encoding the SluCas9) of a Slu7 guide RNA sequence of SEQ ID NO: 275, a nucleic acid encoding the Slu7 guide RNA sequence, and a second V5 scaffold sequence. See FIG. 5B at “Design 5” and “Design 6”. Designs 5 and 6 are specific versions of Design 2, as described herein.

[0276] In another particular embodiment, the AAV vector comprises from 5′ to 3′ with respect to the plus strand: the reverse complement of a first V5 scaffold sequence, the reverse complement of a nucleic acid encoding a Slu7 guide RNA sequence of SEQ ID NO: 275, the reverse complement of a U6 promoter for expression of the nucleic acid encoding the Slu7 guide RNA sequence, a CK8e promoter for expression (in the opposite direction of expression of the nucleic acid encoding the Slu7 sgRNA guide sequence) of a nucleic acid encoding a SluCas9, a nucleic acid encoding a c-Myc NLS, a nucleic acid encoding a SluCas9, a nucleic acid encoding a SV40 NLS, a nucleic acid encoding a NP NLS, a U6 promoter for expression (in the same direction as expression of the nucleic acid encoding the SluCas9) of a Slu3 guide RNA sequence selected from SEQ ID NOs: 217 or 950-955, a nucleic acid encoding the Slu3 guide RNA sequence, and a second V5 scaffold sequence. See FIG. 5B at “Design 5” and “Design 6”. Designs 5 and 6 are specific versions of Design 2, as described herein.

[0277] In some embodiments, the first nucleic acid molecule is in a first vector (e.g., AAV9), and the second nucleic acid is in a separate second vector. In some embodiments, the first vector is AAV9. In some embodiments, the second vector is AAV9. In preferred embodiments, the AAV9 vector is less than 5 kb from ITR to ITR in size, inclusive of both ITRs. In particular embodiments, the AAV9 vector is less than 4.9 kb from ITR to ITR in size, inclusive of both ITRs. In further embodiments, the AAV9 vector is less than 4.85 kb from ITR to ITR in size, inclusive of both ITRs. In further embodiments, the AAV9 vector is less than 4.8 kb from ITR to ITR in size, inclusive of both ITRs. In further embodiments, the AAV9 vector is less than 4.75 kb from ITR to ITR in size, inclusive of both ITRs. In further embodiments, the AAV9 vector is less than 4.7 kb from ITR to ITR in size, inclusive of both ITRs. In some embodiments, the second vector comprises from 5′ to 3′ with respect to the plus strand: a promoter for expression of a first copy of a first guide RNA (e.g., a U6 promoter), a first copy of a nucleotide sequence encoding a first guide RNA, a first copy of a nucleotide sequence encoding a first guide RNA scaffold, a promoter for expression of a second copy of the first guide RNA (e.g., a H1 promoter), a second copy of the nucleotide sequence encoding the first guide RNA, a second copy of the nucleotide sequence encoding the first guide RNA scaffold, a promoter for expression of a second guide RNA (e.g., a 7SK promoter), a nucleotide sequence encoding a second guide RNA, and a nucleotide sequence encoding a second guide RNA scaffold. In some embodiments, the second vector comprises from 5′ to 3′ with respect to the plus strand: a promoter for expression of a first guide RNA (e.g., a U6 promoter), a nucleotide sequence encoding a first guide RNA, a nucleotide sequence encoding a first guide RNA scaffold, a promoter for expression of a second guide RNA (e.g., a 7SK promoter), a nucleotide sequence encoding a second guide RNA, and a nucleotide sequence encoding a second guide RNA scaffold. In some embodiments, the second vector comprises a stuffer sequence (e.g., a 3′UTR desmin sequence) between the nucleotide sequence encoding the first guide scaffold sequence and the promoter for expression of the second guide sequence. In some embodiments, the second vector comprises from 5′ to 3′ with respect to the plus strand: the reverse complement of a nucleotide sequence encoding a scaffold for a first guide RNA, the reverse complement of a nucleotide sequence encoding a first guide RNA, the reverse complement of a promoter for expression of the first guide RNA (e.g., a U6c promoter), a promoter for expression of a second guide RNA (e.g., a U6c promoter), a nucleotide sequence encoding a second guide RNA, and a nucleotide sequence encoding a second guide RNA scaffold. In some embodiments, the second vector comprises a stuffer sequence (e.g., a 3′UTR desmin sequence) between the reverse complement of the promoter for expression of the first guide RNA and the promoter for expression of the second guide RNA. In some embodiments, the second vector comprises from 5′ to 3′ with respect to the plus strand: the reverse complement of a nucleotide sequence encoding a first copy of a first guide RNA scaffold, the reverse complement of a nucleotide sequence encoding a first copy of the first guide RNA, the reverse complement of a promoter for expression of the first copy of the first guide RNA (e.g., a 7SK2 promoter), the reverse complement of a second copy of the nucleotide sequence encoding the first guide RNA scaffold, the reverse complement of a second copy of the nucleotide sequence encoding the first guide RNA, the reverse complement of a promoter for expression of the second copy of the nucleotide sequence encoding the first guide RNA (e.g., a hU6c promoter), a promoter for expression of a first copy of a second guide RNA (e.g., a hU6c promoter), a first copy of a nucleotide sequence encoding a second guide RNA, a first copy of a nucleotide sequence encoding a second guide RNA scaffold, a promoter for expression of a second copy of the second guide RNA (e.g., a 7Sk2 promoter), a second copy of the nucleotide sequence encoding the second guide RNA, and a second copy of the nucleotide sequence encoding the second guide RNA scaffold. In some embodiments, the second vector comprises a stuffer sequence (e.g., a 3′UTR desmin sequence) between the reverse complement of the promoter for expression of the second copy of the first guide RNA and the promoter for expression of the first copy of the second guide RNA. In some embodiments, the second vector comprises from 5′ to 3′ with respect to the plus strand: the reverse complement of a nucleotide sequence encoding a first copy of a first guide RNA scaffold, the reverse complement of a first copy of a nucleotide sequence encoding the first guide RNA, the reverse complement of a promoter for expression of the first copy of the first guide RNA (e.g., a 7SK2 promoter), the reverse complement of a first copy of a nucleotide sequence encoding a second guide RNA scaffold, the reverse complement of a nucleotide sequence encoding the first copy of the second guide RNA, the reverse complement of a promoter for expression of the first copy of the second guide RNA (e.g., a hU6c promoter), a promoter for expression of a second copy of the second guide RNA (e.g., a hU6c promoter), a second copy of the nucleotide sequence encoding the second guide RNA, a second copy of the nucleotide sequence encoding the second guide RNA scaffold, a promoter for expression of a second copy of the first guide RNA (e.g., a 7SK2 promoter), a second copy of the nucleotide sequence encoding the first guide RNA, and a second copy of the nucleotide sequence encoding the first guide RNA scaffold. In some embodiments, the second vector comprises a stuffer sequence (e.g., a 3′UTR desmin sequence) between the reverse complement of the promoter for expression of the first copy of the second guide RNA and the promoter for expression of the second copy of the first guide RNA. In some embodiments, the second vector comprises from 5′ to 3′ with respect to the plus strand: the reverse complement of a nucleotide sequence encoding a first guide RNA scaffold, the reverse complement of a nucleotide sequence encoding a first guide RNA, the reverse complement of a promoter for expression of a first guide RNA (e.g., a hU6c promoter), a promoter for expression of a second guide RNA (e.g., a hU6c promoter), a nucleotide sequence encoding a second guide RNA, and a nucleotide sequence encoding a second guide RNA scaffold. In some embodiments, the second vector comprises a stuffer sequence (e.g., a 3′UTR desmin sequence) between the reverse complement of the promoter for expression of the first guide RNA and the promoter for expression of the second guide RNA. In particular embodiments, the first guide RNA is different from the second guide RNA. In some embodiments, the first guide RNA comprises a sequence of Table 6 and the second guide RNA comprises a different sequence from Table 6.

[0278] In some embodiments, if the composition comprises one or more nucleic acids encoding an RNA-targeted endonuclease and one or more guide RNAs, the one or more nucleic acids are designed such that they express the one or more guide RNAs at an equivalent or higher level (e.g., a greater number of expressed transgene copies) as compared to the expression level of the RNA-targeted endonuclease. In some embodiments, the one or more nucleic acids are designed such that they express (e.g., on average in 100 cells) the one or more guide RNAs at least a 1.1, 1.2, 1.3, 1.4, or 1.5 times higher level (e.g., a greater number of expressed transgene copies) as compared to the expression level of the RNA-targeted endonuclease. In some embodiments, the one or more nucleic acids are designed such that they express the one or more guide RNAs at 1.01-1.5, 1.01-1.4, 1.01-1.3, 1.01-1.2, 1.01-1.1, 1.1-2.0, 1.1-1.8, 1.1-1.6, 1.1-1.4, 1.1-1.3, 1.2-2.0, 1.2-1.8, 1.2-1.6, 1.2-1.4, 1.4-2.0, 1.4-1.8, 1.4-1.6, 1.6-2.0, 1.6-1.8, or 1.8-2.0 times higher level (e.g., a greater number of expressed transgene copies) as compared to the expression level of the RNA-targeted endonuclease. In some embodiments, the one or more guide RNAs are designed to express a higher level than the RNA-targeted endonuclease by: a) utilizing one or more regulatory elements (e.g., promoters or enhancers) that express the one or more guide RNAs at a higher level as compared to the regulatory elements (e.g., promoters or enhancers) for expression of the RNA-targeted endonuclease; and/or b) expressing more copies of one or more of the guide RNAs as compared to the number of copies of the RNA-targeted endonuclease (e.g., 2× or 3× as many copies of the nucleotide sequences encoding the one or more guide RNAs as compared to the number of copies of the nucleotide sequences encoding the RNA-targeted endonuclease). For example, in some embodiments, the composition comprises multiple nucleic acid molecules (e.g., in multiple vectors), wherein for every nucleotide sequence encoding an RNA-targeted endonuclease in the nucleic acid molecules in the composition, there are two or three copies of the nucleotide sequence encoding the guide RNA in the nucleic acid molecules in the composition. In some embodiments, the composition comprises a first guide RNA and a second guide RNA, wherein the first guide RNA and the second guide RNA are not the same (e.g., any of the guide RNA pairs disclosed herein), and for every nucleotide sequence encoding an RNA-targeted endonuclease in the nucleic acid molecules in the composition, there are two or three copies of the nucleotide sequence encoding the first guide RNA and/or the second guide RNA.

### Endonucleases

[0279] In some embodiments, any of the nucleic acids disclosed herein encodes an RNA-targeted endonuclease. In some embodiments, the RNA-targeted endonuclease has cleavase activity, which can also be referred to as double-strand endonuclease activity. In some embodiments, the RNA-targeted endonuclease comprises a Cas nuclease. Examples of Cas9 nucleases include those of the type II CRISPR systems.

[0280] In some embodiments, the Cas protein comprises an amino acid sequence that is at least 80%, 85%, 90%, 91%, 92%, 93%, 94%, 95%, 96%, 97%, 98%, 99% or 100% identical to the sequence of SEQ ID NO: 941 (designated herein as SpCas9):

[sequence omitted]

[0281] In some embodiments, the nucleic acid encoding SaCas9 encodes an SaCas9 comprising an amino acid sequence that is at least 80%, 85%, 90%, 91%, 92%, 93%, 94%, 95%, 96%, 97%, 98%, 99% or 100% identical to the sequence of SEQ ID NO: 711:

KRNYILGLDIGITSVGYGIIDYETRDVIDAGVRLFKEANVENNEG
RRSKRGARRLKRRRRHRIQRVKKLLFDYNLLTDHSELSGINPYEA
RVKGLSQKLSEEEFSAALLHLAKRRGVHNVNEVEEDTGNELSTKE
QISRNSKALEEKYVAELQLERLKKDGEVRGSINRFKTSDYVKEAK
QLLKVQKAYHQLDQSFIDTYIDLLETRRTYYEGPGEGSPFGWKDI
KEWYEMLMGHCTYFPEELRSVKYAYNADLYNALNDLNNLVITRDE
NEKLEYYEKFQIIENVFKQKKKPTLKQIAKEILVNEEDIKGYRVT
STGKPEFTNLKVYHDIKDITARKEIIENAELLDQIAKILTIYQSS
EDIQEELTNLNSELTQEEIEQISNLKGYTGTHNLSLKAINLILDE
LWHTNDNQIAIFNRLKLVPKKVDLSQQKEIPTTLVDDFILSPVVK
RSFIQSIKVINAIIKKYGLPNDIIIELAREKNSKDAQKMINEMQK
RNRQTNERIEEIIRTTGKENAKYLIEKIKLHDMQEGKCLYSLEAI
PLEDLLNNPFNYEVDHIIPRSVSFDNSFNNKVLVKQEENSKKGNR
TPFQYLSSSDSKISYETFKKHILNLAKGKGRISKTKKEYLLEERD
INRFSVQKDFINRNLVDTRYATRGLMNLLRSYFRVNNLDVKVKSI
NGGFTSFLRRKWKFKKERNKGYKHHAEDALIIANADFIFKEWKKL
DKAKKVMENQMFEEKQAESMPEIETEQEYKEIFITPHQIKHIKDF
KDYKYSHRVDKKPNRELINDTLYSTRKDDKGNTLIVNNLNGLYDK
DNDKLKKLINKSPEKLLMYHHDPQTYQKLKLIMEQYGDEKNPLYK
YYEETGNYLTKYSKKDNGPVIKKIKYYGNKLNAHLDITDDYPNSR
NKVVKLSLKPYRFDVYLDNGVYKFVTVKNLDVIKKENYYEVNSKC
YEEAKKLKKISNQAEFIASFYNNDLIKINGELYRVIGVNNDLLNR
IEVNMIDITYREYLENMNDKRPPRIIKTIASKTQSIKKYSTDILG
NLYEVKSKKHPQIIKKG.

[0282] In some embodiments, the nucleic acid encoding SaCas9 comprises the nucleic acid of SEQ ID NO: 9014:

AAGCGCAATTACATCCTGGGCCTGGATATCGGCATCACCTCCGTG
GGCTACGGCATCATCGACTATGAGACACGGGATGTGATCGACGCC
GGCGTGAGACTGTTCAAGGAGGCCAACGTGGAGAACAATGAGGGC
CGGCGGAGCAAGAGGGGAGCAAGGCGCCTGAAGCGGAGAAGGCGC
CACAGAATCCAGAGAGTGAAGAAGCTGCTGTTCGATTACAACCTG
CTGACCGACCACTCCGAGCTGTCTGGCATCAATCCTTATGAGGCC
CGGGTGAAGGGCCTGTCCCAGAAGCTGTCTGAGGAGGAGTTTTCT
GCCGCCCTGCTGCACCTGGCAAAGAGGAGAGGCGTGCACAACGTG
AATGAGGTGGAGGAGGACACCGGCAACGAGCTGAGCACAAAGGAG
CAGATCAGCCGCAATTCCAAGGCCCTGGAGGAGAAGTATGTGGCC
GAGCTGCAGCTGGAGCGGCTGAAGAAGGATGGCGAGGTGAGGGGC
TCCATCAATCGCTTCAAGACCTCTGACTACGTGAAGGAGGCCAAG
CAGCTGCTGAAGGTGCAGAAGGCCTACCACCAGCTGGATCAGAGC
TTTATCGATACATATATCGACCTGCTGGAGACCAGGCGCACATAC
TATGAGGGACCAGGAGAGGGCTCCCCCTTCGGCTGGAAGGACATC
AAGGAGTGGTACGAGATGCTGATGGGCCACTGCACCTATTTTCCA
GAGGAGCTGAGATCCGTGAAGTACGCCTATAACGCCGATCTGTAC
AACGCCCTGAATGACCTGAACAACCTGGTCATCACCAGGGATGAG
AACGAGAAGCTGGAGTACTATGAGAAGTTCCAGATCATCGAGAAC
GTGTTCAAGCAGAAGAAGAAGCCTACACTGAAGCAGATCGCCAAG
GAGATCCTGGTGAACGAGGAGGACATCAAGGGCTACCGCGTGACC
AGCACAGGCAAGCCAGAGTTCACCAATCTGAAGGTGTATCACGAT
ATCAAGGACATCACAGCCCGGAAGGAGATCATCGAGAACGCCGAG
CTGCTGGATCAGATCGCCAAGATCCTGACCATCTATCAGAGCTCC
GAGGACATCCAGGAGGAGCTGACCAACCTGAATAGCGAGCTGACA
CAGGAGGAGATCGAGCAGATCAGCAATCTGAAGGGCTACACCGGC
ACACACAACCTGTCCCTGAAGGCCATCAATCTGATCCTGGATGAG
CTGTGGCACACAAACGACAATCAGATCGCCATCTTTAACAGGCTG
AAGCTGGTGCCAAAGAAGGTGGACCTGAGCCAGCAGAAGGAGATC
CCAACCACACTGGTGGACGATTTCATCCTGTCCCCCGTGGTGAAG
CGGAGCTTCATCCAGAGCATCAAAGTGATCAACGCCATCATCAAG
AAGTACGGCCTGCCCAATGATATCATCATCGAGCTGGCCAGGGAG
AAGAACTCTAAGGACGCCCAGAAGATGATCAATGAGATGCAGAAG
AGGAACCGCCAGACCAATGAGCGGATCGAGGAGATCATCAGAACC
ACAGGCAAGGAGAACGCCAAGTACCTGATCGAGAAGATCAAGCTG
CACGATATGCAGGAGGGCAAGTGTCTGTATAGCCTGGAGGCCATC
CCTCTGGAGGACCTGCTGAACAATCCATTCAACTACGAGGTGGAT
CACATCATCCCCCGGAGCGTGAGCTTCGACAATTCCTTTAACAAT
AAGGTGCTGGTGAAGCAGGAGGAGAACTCTAAGAAGGGCAATAGG
ACCCCTTTCCAGTACCTGTCTAGCTCCGATTCTAAGATCAGCTAC
GAGACCTTCAAGAAGCACATCCTGAATCTGGCCAAGGGCAAGGGC
CGCATCTCTAAGACCAAGAAGGAGTACCTGCTGGAGGAGCGGGAC
ATCAACAGATTCAGCGTGCAGAAGGACTTCATCAACCGGAATCTG
GTGGACACCAGATACGCCACACGCGGCCTGATGAATCTGCTGCGG
TCCTATTTCAGAGTGAACAATCTGGATGTGAAGGTGAAGAGCATC
AACGGCGGCTTCACCTCCTTTCTGCGGAGAAAGTGGAAGTTTAAG
AAGGAGAGAAACAAGGGCTATAAGCACCACGCCGAGGATGCCCTG
ATCATCGCCAATGCCGACTTCATCTTTAAGGAGTGGAAGAAGCTG
GACAAGGCCAAGAAAGTGATGGAGAACCAGATGTTCGAGGAGAAG
CAGGCCGAGAGCATGCCCGAGATCGAGACCGAGCAGGAGTACAAG
GAGATTTTCATCACACCTCACCAGATCAAGCACATCAAGGACTTC
AAGGACTACAAGTATTCCCACAGGGTGGATAAGAAGCCCAACCGC
GAGCTGATCAATGACACCCTGTATTCTACAAGGAAGGACGATAAG
GGCAATACCCTGATCGTGAACAATCTGAACGGCCTGTACGACAAG
GATAATGACAAGCTGAAGAAGCTGATCAACAAGAGCCCCGAGAAG
CTGCTGATGTACCACCACGATCCTCAGACATATCAGAAGCTGAAG
CTGATCATGGAGCAGTACGGCGACGAGAAGAACCCACTGTATAAG
TACTATGAGGAGACCGGCAACTACCTGACAAAGTATTCCAAGAAG
GATAATGGCCCCGTGATCAAGAAGATCAAGTACTATGGCAACAAG
CTGAATGCCCACCTGGACATCACCGACGATTACCCCAACAGCCGG
AATAAGGTGGTGAAGCTGAGCCTGAAGCCATACAGGTTCGACGTG
TACCTGGACAACGGCGTGTATAAGTTTGTGACAGTGAAGAATCTG
GATGTGATCAAGAAGGAGAACTACTATGAAGTGAATAGCAAGTGC
TACGAGGAGGCCAAGAAGCTGAAGAAGATCAGCAACCAGGCCGAG
TTCATCGCCTCTTTTTACAACAATGACCTGATCAAGATCAATGGC
GAGCTGTATAGAGTGATCGGCGTGAACAATGATCTGCTGAACCGC
ATCGAAGTGAATATGATCGACATCACCTACCGGGAGTATCTGGAG
AACATGAATGATAAGAGGCCCCCTCGCATCATCAAGACCATCGCC
TCTAAGACACAGAGCATCAAGAAGTACTCTACAGACATCCTGGGC
AACCTGTATGAGGTGAAGAGCAAGAAGCACCCTCAGATCATCAAG
AAGGGC.

In some embodiments comprising a nucleic acid encoding SaCas9, the SaCas9 comprises an amino acid sequence of SEQ ID NO: 711.

[0283] In some embodiments, the SaCas9 is a variant of the amino acid sequence of SEQ ID NO: 711. In some embodiments, the SaCas9 comprises an amino acid other than an E at the position corresponding to position 781 of SEQ ID NO: 711. In some embodiments, the SaCas9 comprises an amino acid other than an N at the position corresponding to position 967 of SEQ ID NO: 711. In some embodiments, the SaCas9 comprises an amino acid other than an R at the position corresponding to position 1014 of SEQ ID NO: 711. In some embodiments, the SaCas9 comprises a K at the position corresponding to position 781 of SEQ ID NO: 711. In some embodiments, the SaCas9 comprises a K at the position corresponding to position 967 of SEQ ID NO: 711. In some embodiments, the SaCas9 comprises an H at the position corresponding to position 1014 of SEQ ID NO: 711. In some embodiments, the SaCas9 comprises an amino acid other than an E at the position corresponding to position 781 of SEQ ID NO: 711; an amino acid other than an N at the position corresponding to position 967 of SEQ ID NO: 711; and an amino acid other than an R at the position corresponding to position 1014 of SEQ ID NO: 711. In some embodiments, the SaCas9 comprises a K at the position corresponding to position 781 of SEQ ID NO: 711; a K at the position corresponding to position 967 of SEQ ID NO: 711; and an H at the position corresponding to position 1014 of SEQ ID NO: 711.

[0284] In some embodiments, the SaCas9 comprises an amino acid other than an R at the position corresponding to position 244 of SEQ ID NO: 711. In some embodiments, the SaCas9 comprises an amino acid other than an N at the position corresponding to position 412 of SEQ ID NO: 711. In some embodiments, the SaCas9 comprises an amino acid other than an N at the position corresponding to position 418 of SEQ ID NO: 711. In some embodiments, the SaCas9 comprises an amino acid other than an R at the position corresponding to position 653 of SEQ ID NO: 711. In some embodiments, the SaCas9 comprises an amino acid other than an R at the position corresponding to position 244 of SEQ ID NO: 711; an amino acid other than an N at the position corresponding to position 412 of SEQ ID NO: 711; an amino acid other than an N at the position corresponding to position 418 of SEQ ID NO: 711; and an amino acid other than an R at the position corresponding to position 653 of SEQ ID NO: 711. In some embodiments, the SaCas9 comprises an A at the position corresponding to position 244 of SEQ ID NO: 711. In some embodiments, the SaCas9 comprises an A at the position corresponding to position 412 of SEQ ID NO: 711. In some embodiments, the SaCas9 comprises an A at the position corresponding to position 418 of SEQ ID NO: 711. In some embodiments, the SaCas9 comprises an A at the position corresponding to position 653 of SEQ ID NO: 711. In some embodiments, the SaCas9 comprises an A at the position corresponding to position 244 of SEQ ID NO: 711; an A at the position corresponding to position 412 of SEQ ID NO: 711; an A at the position corresponding to position 418 of SEQ ID NO: 711; and an A at the position corresponding to position 653 of SEQ ID NO: 711.

[0285] In some embodiments, the SaCas9 comprises an amino acid other than an R at the position corresponding to position 244 of SEQ ID NO: 711; an amino acid other than an N at the position corresponding to position 412 of SEQ ID NO: 711; an amino acid other than an N at the position corresponding to position 418 of SEQ ID NO: 711; an amino acid other than an R at the position corresponding to position 653 of SEQ ID NO: 711; an amino acid other than an E at the position corresponding to position 781 of SEQ ID NO: 711; an amino acid other than an N at the position corresponding to position 967 of SEQ ID NO: 711; and an amino acid other than an R at the position corresponding to position 1014 of SEQ ID NO: 711. In some embodiments, the SaCas9 comprises an A at the position corresponding to position 244 of SEQ ID NO: 711; an A at the position corresponding to position 412 of SEQ ID NO: 711; an A at the position corresponding to position 418 of SEQ ID NO: 711; an A at the position corresponding to position 653 of SEQ ID NO: 711; a K at the position corresponding to position 781 of SEQ ID NO: 711; a K at the position corresponding to position 967 of SEQ ID NO: 711; and an H at the position corresponding to position 1014 of SEQ ID NO: 711.

[0286] In some embodiments, the SaCas9 comprises an amino acid sequence that is at least 80%, 85%, 90%, 91%, 92%, 93%, 94%, 95%, 96%, 97%, 98%, 99% or 100% identical to the sequence of SEQ ID NO: 715 (designated herein as SaCas9-KKH or SACAS9KKH):

KRNYILGLDIGITSVGYGIIDYETRDVIDAGVRLFKEANVENNEG
RRSKRGARRLKRRRRHRIQRVKKLLFDYNLLTDHSELSGINPYEA
RVKGLSQKLSEEEFSAALLHLAKRRGVHNVNEVEEDTGNELSTKE
QISRNSKALEEKYVAELQLERLKKDGEVRGSINRFKTSDYVKEAK
QLLKVQKAYHQLDQSFIDTYIDLLETRRTYYEGPGEGSPFGWKDI
KEWYEMLMGHCTYFPEELRSVKYAYNADLYNALNDLNNLVITRDE
NEKLEYYEKFQIIENVFKQKKKPTLKQIAKEILVNEEDIKGYRVT
STGKPEFTNLKVYHDIKDITARKEIIENAELLDQIAKILTIYQSS
EDIQEELTNLNSELTQEEIEQISNLKGYTGTHNLSLKAINLILDE
LWHTNDNQIAIFNRLKLVPKKVDLSQQKEIPTTLVDDFILSPVVK
RSFIQSIKVINAIIKKYGLPNDIIIELAREKNSKDAQKMINEMQK
RNRQTNERIEEIIRTTGKENAKYLIEKIKLHDMQEGKCLYSLEAI
PLEDLLNNPFNYEVDHIIPRSVSFDNSFNNKVLVKQEENSKKGNR
TPFQYLSSSDSKISYETFKKHILNLAKGKGRISKTKKEYLLEERD
INRFSVQKDFINRNLVDTRYATRGLMNLLRSYFRVNNLDVKVKSI
NGGFTSFLRRKWKFKKERNKGYKHHAEDALIIANADFIFKEWKKL
DKAKKVMENQMFEEKQAESMPEIETEQEYKEIFITPHQIKHIKDF
KDYKYSHRVDKKPNRKLINDTLYSTRKDDKGNTLIVNNLNGLYDK
DNDKLKKLINKSPEKLLMYHHDPQTYQKLKLIMEQYGDEKNPLYK
YYEETGNYLTKYSKKDNGPVIKKIKYYGNKLNAHLDITDDYPNSR
NKVVKLSLKPYRFDVYLDNGVYKFVTVKNLDVIKKENYYEVNSKC
YEEAKKLKKISNQAEFIASFYKNDLIKINGELYRVIGVNNDLLNR
IEVNMIDITYREYLENMNDKRPPHIIKTIASKTQSIKKYSTDILG
NLYEVKSKKHPQIIKKG.

[0287] In some embodiments, the SaCas9 comprises an amino acid sequence that is at least 80%, 85%, 90%, 91%, 92%, 93%, 94%, 95%, 96%, 97%, 98%, 99% or 100% identical to the sequence of SEQ ID NO: 716 (designated herein as SaCas9-HF):

KRNYILGLDIGITSVGYGIIDYETRDVIDAGVRLFKEANVENNEG
RRSKRGARRLKRRRRHRIQRVKKLLFDYNLLTDHSELSGINPYEA
RVKGLSQKLSEEEFSAALLHLAKRRGVHNVNEVEEDTGNELSTKE
QISRNSKALEEKYVAELQLERLKKDGEVRGSINRFKTSDYVKEAK
QLLKVQKAYHQLDQSFIDTYIDLLETRRTYYEGPGEGSPFGWKDI
KEWYEMLMGHCTYFPEELASVKYAYNADLYNALNDLNNLVITRDE
NEKLEYYEKFQIIENVFKQKKKPTLKQIAKEILVNEEDIKGYRVT
STGKPEFTNLKVYHDIKDITARKEIIENAELLDQIAKILTIYQSS
EDIQEELTNLNSELTQEEIEQISNLKGYTGTHNLSLKAINLILDE
LWHTNDAQIAIFARLKLVPKKVDLSQQKEIPTTLVDDFILSPVVK
RSFIQSIKVINAIIKKYGLPNDIIIELAREKNSKDAQKMINEMQK
RNRQTNERIEEIIRTTGKENAKYLIEKIKLHDMQEGKCLYSLEAI
PLEDLLNNPFNYEVDHIIPRSVSFDNSFNNKVLVKQEENSKKGNR
TPFQYLSSSDSKISYETFKKHILNLAKGKGRISKTKKEYLLEERD
INRFSVQKDFINRNLVDTRYATAGLMNLLRSYFRVNNLDVKVKSI
NGGFTSFLRRKWKFKKERNKGYKHHAEDALIIANADFIFKEWKKL
DKAKKVMENQMFEEKQAESMPEIETEQEYKEIFITPHQIKHIKDF
KDYKYSHRVDKKPNRELINDTLYSTRKDDKGNTLIVNNLNGLYDK
DNDKLKKLINKSPEKLLMYHHDPQTYQKLKLIMEQYGDEKNPLYK
YYEETGNYLTKYSKKDNGPVIKKIKYYGNKLNAHLDITDDYPNSR
NKVVKLSLKPYRFDVYLDNGVYKFVTVKNLDVIKKENYYEVNSKC
YEEAKKLKKISNQAEFIASFYNNDLIKINGELYRVIGVNNDLLNR
IEVNMIDITYREYLENMNDKRPPRIIKTIASKTQSIKKYSTDILG
NLYEVKSKKHPQIIKKG.

[0288] In some embodiments, the SaCas9 comprises an amino acid sequence that is at least 80%, 85%, 90%, 91%, 92%, 93%, 94%, 95%, 96%, 97%, 98%, 99% or 100% identical to the sequence of SEQ ID NO: 717 (designated herein as SaCas9-KKH-HF):

KRNYILGLDIGITSVGYGIIDYETRDVIDAGVRLFKEANVENNEG
RRSKRGARRLKRRRRHRIQRVKKLLFDYNLLTDHSELSGINPYEA
RVKGLSQKLSEEEFSAALLHLAKRRGVHNVNEVEEDTGNELSTKE
QISRNSKALEEKYVAELQLERLKKDGEVRGSINRFKTSDYVKEAK
QLLKVQKAYHQLDQSFIDTYIDLLETRRTYYEGPGEGSPFGWKDI
KEWYEMLMGHCTYFPEELASVKYAYNADLYNALNDLNNLVITRDE
NEKLEYYEKFQIIENVFKQKKKPTLKQIAKEILVNEEDIKGYRVT
STGKPEFTNLKVYHDIKDITARKEIIENAELLDQIAKILTIYQSS
EDIQEELTNLNSELTQEEIEQISNLKGYTGTHNLSLKAINLILDE
LWHTNDAQIAIFARLKLVPKKVDLSQQKEIPTTLVDDFILSPVVK
RSFIQSIKVINAIIKKYGLPNDIIIELAREKNSKDAQKMINEMQK
RNRQTNERIEEIIRTTGKENAKYLIEKIKLHDMQEGKCLYSLEAI
PLEDLLNNPFNYEVDHIIPRSVSFDNSFNNKVLVKQEENSKKGNR
TPFQYLSSSDSKISYETFKKHILNLAKGKGRISKTKKEYLLEERD
INRFSVQKDFINRNLVDTRYATAGLMNLLRSYFRVNNLDVKVKSI
NGGFTSFLRRKWKFKKERNKGYKHHAEDALIIANADFIFKEWKKL
DKAKKVMENQMFEEKQAESMPEIETEQEYKEIFITPHQIKHIKDF
KDYKYSHRVDKKPNRKLINDTLYSTRKDDKGNTLIVNNLNGLYDK
DNDKLKKLINKSPEKLLMYHHDPQTYQKLKLIMEQYGDEKNPLYK
YYEETGNYLTKYSKKDNGPVIKKIKYYGNKLNAHLDITDDYPNSR
NKVVKLSLKPYRFDVYLDNGVYKFVTVKNLDVIKKENYYEVNSKC
YEEAKKLKKISNQAEFIASFYKNDLIKINGELYRVIGVNNDLLNR
IEVNMIDITYREYLENMNDKRPPHIIKTIASKTQSIKKYSTDILG
NLYEVKSKKHPQIIKKG.

[0289] In some embodiments, the nucleic acid encoding SluCas9 encodes a SluCas9 comprising an amino acid sequence that is at least 80%, 85%, 90%, 91%, 92%, 93%, 94%, 95%, 96%, 97%, 98%, 99% or 100% identical to the sequence of SEQ ID NO: 712:

NQKFILGLDIGITSVGYGLIDYETKNIIDAGVRLFPEANVENNEG
RRSKRGSRRLKRRRIHRLERVKKLLEDYNLLDQSQIPQSTNPYAI
RVKGLSEALSKDELVIALLHIAKRRGIHKIDVIDSNDDVGNELST
KEQLNKNSKLLKDKFVCQIQLERMNEGQVRGEKNRFKTADIIKEI
IQLLNVQKNFHQLDENFINKYIELVEMRREYFEGPGKGSPYGWEG
DPKAWYETLMGHCTYFPDELRSVKYAYSADLFNALNDLNNLVIQR
DGLSKLEYHEKYHIIENVFKQKKKPTLKQIANEINVNPEDIKGYR
ITKSGKPQFTEFKLYHDLKSVLFDQSILENEDVLDQIAEILTIYQ
DKDSIKSKLTELDILLNEEDKENIAQLTGYTGTHRLSLKCIRLVL
EEQWYSSRNQMEIFTHLNIKPKKINLTAANKIPKAMIDEFILSPV
VKRTFGQAINLINKIIEKYGVPEDIIIELARENNSKDKQKFINEM
QKKNENTRKRINEIIGKYGNQNAKRLVEKIRLHDEQEGKCLYSLE
SIPLEDLLNNPNHYEVDHIIPRSVSFDNSYHNKVLVKQSENSKKS
NLTPYQYFNSGKSKLSYNQFKQHILNLSKSQDRISKKKKEYLLEE
RDINKFEVQKEFINRNLVDTRYATRELTNYLKAYFSANNMNVKVK
TINGSFTDYLRKVWKFKKERNHGYKHHAEDALIIANADFLFKENK
KLKAVNSVLEKPEIETKQLDIQVDSEDNYSEMFIIPKQVQDIKDF
RNFKYSHRVDKKPNRQLINDTLYSTRKKDNSTYIVQTIKDIYAKD
NTTLKKQFDKSPEKFLMYQHDPRTFEKLEVIMKQYANEKNPLAKY
HEETGEYLTKYSKKNNGPIVKSLKYIGNKLGSHLDVTHQFKSSTK
KLVKLSIKPYRFDVYLTDKGYKFITISYLDVLKKDNYYYIPEQKY
DKLKLGKAIDKNAKFIASFYKNDLIKLDGEIYKIIGVNSDTRNMI
ELDLPDIRYKEYCELNNIKGEPRIKKTIGKKVNSIEKLTTDVLGN
VFTNTQYTKPQLLFKRGN.

[0290] In some embodiments, the SluCas9 is a variant of the amino acid sequence of SEQ ID NO: 712. In some embodiments, the SluCas9 comprises an amino acid other than an Q at the position corresponding to position 781 of SEQ ID NO: 712. In some embodiments, the SluCas9 comprises an amino acid other than an R at the position corresponding to position 1013 of SEQ ID NO: 712. In some embodiments, the SluCas9 comprises a K at the position corresponding to position 781 of SEQ ID NO: 712. In some embodiments, the SluCas9 comprises a K at the position corresponding to position 966 of SEQ ID NO: 712. In some embodiments, the SluCas9 comprises an H at the position corresponding to position 1013 of SEQ ID NO: 712. In some embodiments, the SluCas9 comprises an amino acid other than an Q at the position corresponding to position 781 of SEQ ID NO: 712; and an amino acid other than an R at the position corresponding to position 1013 of SEQ ID NO: 712. In some embodiments, the SluCas9 comprises a K at the position corresponding to position 781 of SEQ ID NO: 712; a K at the position corresponding to position 966 of SEQ ID NO: 712; and an H at the position corresponding to position 1013 of SEQ ID NO: 712.

[0291] In some embodiments, the SluCas9 comprises an amino acid other than an R at the position corresponding to position 246 of SEQ ID NO: 712. In some embodiments, the SluCas9 comprises an amino acid other than an N at the position corresponding to position 414 of SEQ ID NO: 712. In some embodiments, the SluCas9 comprises an amino acid other than a T at the position corresponding to position 420 of SEQ ID NO: 712. In some embodiments, the SluCas9 comprises an amino acid other than an R at the position corresponding to position 655 of SEQ ID NO: 712. In some embodiments, the SluCas9 comprises an amino acid other than an R at the position corresponding to position 246 of SEQ ID NO: 712; an amino acid other than an N at the position corresponding to position 414 of SEQ ID NO: 712; an amino acid other than a T at the position corresponding to position 420 of SEQ ID NO: 712; and an amino acid other than an R at the position corresponding to position 655 of SEQ ID NO: 712. In some embodiments, the SluCas9 comprises an A at the position corresponding to position 246 of SEQ ID NO: 712. In some embodiments, the SluCas9 comprises an A at the position corresponding to position 414 of SEQ ID NO: 712. In some embodiments, the SluCas9 comprises an A at the position corresponding to position 420 of SEQ ID NO: 712. In some embodiments, the SluCas9 comprises an A at the position corresponding to position 655 of SEQ ID NO: 712. In some embodiments, the SluCas9 comprises an A at the position corresponding to position 246 of SEQ ID NO: 712; an A at the position corresponding to position 414 of SEQ ID NO: 712; an A at the position corresponding to position 420 of SEQ ID NO: 712; and an A at the position corresponding to position 655 of SEQ ID NO: 712.

[0292] In some embodiments, the SluCas9 comprises an amino acid other than an R at the position corresponding to position 246 of SEQ ID NO: 712; an amino acid other than an N at the position corresponding to position 414 of SEQ ID NO: 712; an amino acid other than a T at the position corresponding to position 420 of SEQ ID NO: 712; an amino acid other than an R at the position corresponding to position 655 of SEQ ID NO: 712; an amino acid other than an Q at the position corresponding to position 781 of SEQ ID NO: 712; a K at the position corresponding to position 966 of SEQ ID NO: 712; and an amino acid other than an R at the position corresponding to position 1013 of SEQ ID NO: 712. In some embodiments, the SluCas9 comprises an A at the position corresponding to position 246 of SEQ ID NO: 712; an A at the position corresponding to position 414 of SEQ ID NO: 712; an A at the position corresponding to position 420 of SEQ ID NO: 712; an A at the position corresponding to position 655 of SEQ ID NO: 712; a K at the position corresponding to position 781 of SEQ ID NO: 712; a K at the position corresponding to position 966 of SEQ ID NO: 712; and an H at the position corresponding to position 1013 of SEQ ID NO: 712.

[0293] In some embodiments, the SluCas9 comprises an amino acid sequence that is at least 80%, 85%, 90%, 91%, 92%, 93%, 94%, 95%, 96%, 97%, 98%, 99% or 100% identical to the sequence of SEQ ID NO: 718 (designated herein as SluCas9-KH or SLUCAS9KH):

NQKFILGLDIGITSVGYGLIDYETKNIIDAGVRLFPEANVENNEG
RRSKRGSRRLKRRRIHRLERVKKLLEDYNLLDQSQIPQSTNPYAI
RVKGLSEALSKDELVIALLHIAKRRGIHKIDVIDSNDDVGNELST
KEQLNKNSKLLKDKFVCQIQLERMNEGQVRGEKNRFKTADIIKEI
IQLLNVQKNFHQLDENFINKYIELVEMRREYFEGPGKGSPYGWEG
DPKAWYETLMGHCTYFPDELRSVKYAYSADLFNALNDLNNLVIQR
DGLSKLEYHEKYHIIENVFKQKKKPTLKQIANEINVNPEDIKGYR
ITKSGKPQFTEFKLYHDLKSVLFDQSILENEDVLDQIAEILTIYQ
DKDSIKSKLTELDILLNEEDKENIAQLTGYTGTHRLSLKCIRLVL
EEQWYSSRNQMEIFTHLNIKPKKINLTAANKIPKAMIDEFILSPV
VKRTFGQAINLINKIIEKYGVPEDIIIELARENNSKDKQKFINEM
QKKNENTRKRINEIIGKYGNQNAKRLVEKIRLHDEQEGKCLYSLE
SIPLEDLLNNPNHYEVDHIIPRSVSFDNSYHNKVLVKQSENSKKS
NLTPYQYFNSGKSKLSYNQFKQHILNLSKSQDRISKKKKEYLLEE
RDINKFEVQKEFINRNLVDTRYATRELTNYLKAYFSANNMNVKVK
TINGSFTDYLRKVWKFKKERNHGYKHHAEDALIIANADFLFKENK
KLKAVNSVLEKPEIETKQLDIQVDSEDNYSEMFIIPKQVQDIKDF
RNFKYSHRVDKKPNRKLINDTLYSTRKKDNSTYIVQTIKDIYAKD
NTTLKKQFDKSPEKFLMYQHDPRTFEKLEVIMKQYANEKNPLAKY
HEETGEYLTKYSKKNNGPIVKSLKYIGNKLGSHLDVTHQFKSSTK
KLVKLSIKPYRFDVYLTDKGYKFITISYLDVLKKDNYYYIPEQKY
DKLKLGKAIDKNAKFIASFYKNDLIKLDGEIYKIIGVNSDTRNMI
ELDLPDIRYKEYCELNNIKGEPHIKKTIGKKVNSIEKLTTDVLGN
VFTNTQYTKPQLLFKRGN.

[0294] In some embodiments, the SluCas9 comprises an amino acid sequence that is at least 80%, 85%, 90%, 91%, 92%, 93%, 94%, 95%, 96%, 97%, 98%, 99% or 100% identical to the sequence of SEQ ID NO: 719 (designated herein as SluCas9-HF):

NQKFILGLDIGITSVGYGLIDYETKNIIDAGVRLFPEANVENNEGR
RSKRGSRRLKRRRIHRLERVKKLLEDYNLLDQSQIPQSTNPYAIR
VKGLSEALSKDELVIALLHIAKRRGIHKIDVIDSNDDVGNELSTK
EQLNKNSKLLKDKFVCQIQLERMNEGQVRGEKNRFKTADIIKEII
QLLNVQKNFHQLDENFINKYIELVEMRREYFEGPGKGSPYGWEGD
PKAWYETLMGHCTYFPDELASVKYAYSADLFNALNDLNNLVIQRD
GLSKLEYHEKYHIIENVFKQKKKPTLKQIANEINVNPEDIKGYRI
TKSGKPQFTEFKLYHDLKSVLFDQSILENEDVLDQIAEILTIYQD
KDSIKSKLTELDILLNEEDKENIAQLTGYTGTHRLSLKCIRLVLE
EQWYSSRAQMEIFAHLNIKPKKINLTAANKIPKAMIDEFILSPVV
KRTFGQAINLINKIIEKYGVPEDIIIELARENNSKDKQKFINEMQ
KKNENTRKRINEIIGKYGNQNAKRLVEKIRLHDEQEGKCLYSLES
IPLEDLLNNPNHYEVDHIIPRSVSFDNSYHNKVLVKQSENSKKSN
LTPYQYFNSGKSKLSYNQFKQHILNLSKSQDRISKKKKEYLLEER
DINKFEVQKEFINRNLVDTRYATAELTNYLKAYFSANNMNVKVKT
INGSFTDYLRKVWKFKKERNHGYKHHAEDALIIANADFLFKENKK
LKAVNSVLEKPEIETKQLDIQVDSEDNYSEMFIIPKQVQDIKDFR
NFKYSHRVDKKPNRQLINDTLYSTRKKDNSTYIVQTIKDIYAKDN
TTLKKQFDKSPEKFLMYQHDPRTFEKLEVIMKQYANEKNPLAKYH
EETGEYLTKYSKKNNGPIVKSLKYIGNKLGSHLDVTHQFKSSTKK
LVKLSIKPYRFDVYLTDKGYKFITISYLDVLKKDNYYYIPEQKYD
KLKLGKAIDKNAKFIASFYKNDLIKLDGEIYKIIGVNSDTRNMIE
LDLPDIRYKEYCELNNIKGEPRIKKTIGKKVNSIEKLTTDVLGNV
FTNTQYTKPQLLFKRGN.

[0295] In some embodiments, the SluCas9 comprises an amino acid sequence that is at least 80%, 85%, 90%, 91%, 92%, 93%, 94%, 95%, 96%, 97%, 98%, 99% or 100% identical to the sequence of SEQ ID NO: 720 (designated herein as SluCas9-HF-KH):

NQKFILGLDIGITSVGYGLIDYETKNIIDAGVRLFPEANVENNEG
RRSKRGSRRLKRRRIHRLERVKKLLEDYNLLDQSQIPQSTNPYAI
RVKGLSEALSKDELVIALLHIAKRRGIHKIDVIDSNDDVGNELST
KEQLNKNSKLLKDKFVCQIQLERMNEGQVRGEKNRFKTADIIKEI
IQLLNVQKNFHQLDENFINKYIELVEMRREYFEGPGKGSPYGWEG
DPKAWYETLMGHCTYFPDELASVKYAYSADLFNALNDLNNLVIQR
DGLSKLEYHEKYHIIENVFKQKKKPTLKQIANEINVNPEDIKGYR
ITKSGKPQFTEFKLYHDLKSVLFDQSILENEDVLDQIAEILTIYQ
DKDSIKSKLTELDILLNEEDKENIAQLTGYTGTHRLSLKCIRLVL
EEQWYSSRAQMEIFAHLNIKPKKINLTAANKIPKAMIDEFILSPV
VKRTFGQAINLINKIIEKYGVPEDIIIELARENNSKDKQKFINEM
QKKNENTRKRINEIIGKYGNQNAKRLVEKIRLHDEQEGKCLYSLE
SIPLEDLLNNPNHYEVDHIIPRSVSFDNSYHNKVLVKQSENSKKS
NLTPYQYFNSGKSKLSYNQFKQHILNLSKSQDRISKKKKEYLLEE
RDINKFEVQKEFINRNLVDTRYATAELTNYLKAYFSANNMNVKVK
TINGSFTDYLRKVWKFKKERNHGYKHHAEDALIIANADFLFKENK
KLKAVNSVLEKPEIETKQLDIQVDSEDNYSEMFIIPKQVQDIKDF
RNFKYSHRVDKKPNRKLINDTLYSTRKKDNSTYIVQTIKDIYAKD
NTTLKKQFDKSPEKFLMYQHDPRTFEKLEVIMKQYANEKNPLAKY
HEETGEYLTKYSKKNNGPIVKSLKYIGNKLGSHLDVTHQFKSSTK
KLVKLSIKPYRFDVYLTDKGYKFITISYLDVLKKDNYYYIPEQKY
DKLKLGKAIDKNAKFIASFYKNDLIKLDGEIYKIIGVNSDTRNMI
ELDLPDIRYKEYCELNNIKGEPHIKKTIGKKVNSIEKLTTDVLGN
VFTNTQYTKPQLLFKRGN.

[0296] In some embodiments, the Cas protein is any of the engineered Cas proteins disclosed in Schmidt et al., 2021, Nature Communications, “Improved CRISPR genome editing using small highly active and specific engineered RNA-guided nucleases.”

[0297] In some embodiments, the Cas9 comprises an amino acid sequence that is at least 80%, 85%, 90%, 91%, 92%, 93%, 94%, 95%, 96%, 97%, 98%, 99% or 100% identical to the sequence of SEQ ID NO: 7021 (designated herein as sRGN1):

MNQKFILGLDIGITSVGYGLIDYETKNIIDAGVRLFPEANVENNE
GRRSKRGSRRLKRRRIHRLDRVKHLLAEYDLLDLTNIPKSTNPYQ
TRVKGLNEKLSKDELVIALLHIAKRRGIHNVDVAADKEETASDSL
STKDQINKNAKFLESRYVCELQKERLENEGHVRGVENRFLTKDIV
REAKKIIDTQMQYYPEIDETFKEKYISLVETRREYFEGPGKGSPF
GWEGNIKKWFEQMMGHCTYFPEELRSVKYSYSAELFNALNDLNNL
VITRDEDAKLNYGEKFQIIENVFKQKKTPNLKQIAIEIGVHETEI
KGYRVNKSGTPEFTEFKLYHDLKSIVFDKSILENEAILDQIAEIL
TIYQDEQSIKEELNKLPEILNEQDKAEIAKLIGYNGTHRLSLKCI
HLINEELWQTSRNQMEIFNYLNIKPNKVDLSEQNKIPKDMVNDFI
LSPVVKRTFIQSINVINKVIEKYGIPEDIIIELARENNSDDRKKF
INNLQKKNEATRKRINEIIGQTGNQNAKRIVEKIRLHDQQEGKCL
YSLKDIPLEDLLRNPNNYDIDHIIPRSVSFDDSMHNKVLVRREQN
AKKNNQTPYQYLTSGYADIKYSVFKQHVLNLAENKDRMTKKKREY
LLEERDINKFEVQKEFINRNLVDTRYATRELTNYLKAYFSANNMN
VKVKTINGSFTDYLRKVWKFKKERNHGYKHHAEDALIIANADFLF
KENKKLKAVNSVLEKPEIETKQLDIQVDSEDNYSEMFIIPKQVQD
IKDFRNFKYSHRVDKKPNRQLINDTLYSTRKKDNSTYIVQTIKDI
YAKDNTTLKKQFDKSPEKFLMYQHDPRTFEKLEVIMKQYANEKNP
LAKYHEETGEYLTKYSKKNNGPIVKSLKYIGNKLGSHLDVTHQFK
SSTKKLVKLSIKPYRFDVYLTDKGYKFITISYLDVLKKDNYYYIP
EQKYDKLKLGKAIDKNAKFIASFYKNDLIKLDGEIYKIIGVNSDT
RNMIELDLPDIRYKEYCELNNIKGEPRIKKTIGKKVNSIEKLTTD
VLGNVFTNTQYTKPQLLFKRGN.

[0298] In some embodiments, the Cas9 comprises an amino acid sequence that is at least 80%, 85%, 90%, 91%, 92%, 93%, 94%, 95%, 96%, 97%, 98%, 99% or 100% identical to the sequence of SEQ ID NO: 7022 (designated herein as sRGN2):

MNQKFILGLDIGITSVGYGLIDYETKNIIDAGVRLFPEANVENNE
GRRSKRGSRRLKRRRIHRLERVKSLLSEYKIISGLAPTNNQPYNI
RVKGLTEQLTKDELAVALLHIAKRRGIHKIDVIDSNDDVGNELST
KEQLNKNSKLLKDKFVCQIQLERMNEGQVRGEKNRFKTADIIKEI
IQLLNVQKNFHQLDENFINKYIELVEMRREYFEGPGQGSPFGWNG
DLKKWYEMLMGHCTYFPQELRSVKYAYSADLFNALNDLNNLIIQR
DNSEKLEYHEKYHIIENVFKQKKKPTLKQIAKEIGVNPEDIKGYR
ITKSGTPEFTEFKLYHDLKSVLFDQSILENEDVLDQIAEILTIYQ
DKDSIKSKLTELDILLNEEDKENIAQLTGYNGTHRLSLKCIRLVL
EEQWYSSRNQMEIFTHLNIKPKKINLTAANKIPKAMIDEFILSPV
VKRTFIQSINVINKVIEKYGIPEDIIIELARENNSDDRKKFINNL
QKKNEATRKRINEIIGQTGNQNAKRIVEKIRLHDQQEGKCLYSLE
SIALMDLLNNPQNYEVDHIIPRSVAFDNSIHNKVLVKQIENSKKG
NRTPYQYLNSSDAKLSYNQFKQHILNLSKSKDRISKKKKDYLLEE
RDINKFEVQKEFINRNLVDTRYATRELTSYLKAYFSANNMDVKVK
TINGSFTNHLRKVWRFDKYRNHGYKHHAEDALIIANADFLFKENK
KLKAVNSVLEKPEIETKQLDIQVDSEDNYSEMFIIPKQVQDIKDF
RNFKYSHRVDKKPNRQLINDTLYSTRKKDNSTYIVQTIKDIYAKD
NTTLKKQFDKSPEKFLMYQHDPRTFEKLEVIMKQYANEKNPLAKY
HEETGEYLTKYSKKNNGPIVKSLKYIGNKLGSHLDVTHQFKSSTK
KLVKLSIKPYRFDVYLTDKGYKFITISYLDVLKKDNYYYIPEQKY
DKLKLGKAIDKNAKFIASFYKNDLIKLDGEIYKIIGVNSDTRNMI
ELDLPDIRYKEYCELNNIKGEPRIKKTIGKKVNSIEKLTTDVLGN
VFTNTQYTKPQLLFKRGN.

[0299] In some embodiments, the Cas9 comprises an amino acid sequence that is at least 80%, 85%, 90%, 91%, 92%, 93%, 94%, 95%, 96%, 97%, 98%, 99% or 100% identical to the sequence of SEQ ID NO: 7023 (designated herein as sRGN3):

MNQKFILGLDIGITSVGYGLIDYETKNIIDAGVRLFPEANVENNEGRRSK
RGSRRLKRRRIHRLERVKLLLTEYDLINKEQIPTSNNPYQIRVKGLSEIL
SKDELAIALLHLAKRRGIHNVDVAADKEETASDSLSTKDQINKNAKFLES
RYVCELQKERLENEGHVRGVENRFLTKDIVREAKKIIDTQMQYYPEIDET
FKEKYISLVETRREYFEGPGQGSPFGWNGDLKKWYEMLMGHCTYFPQELR
SVKYAYSADLFNALNDLNNLIIQRDNSEKLEYHEKYHIIENVFKQKKKPT
LKQIAKEIGVNPEDIKGYRITKSGTPEFTSFKLFHDLKKVVKDHAILDDI
DLLNQIAEILTIYQDKDSIVAELGQLEYLMSEADKQSISELTGYTGTHSL
SLKCMNMIIDELWHSSMNQMEVFTYLNMRPKKYELKGYQRIPTDMIDDAI
LSPVVKRTFIQSINVINKVIEKYGIPEDIIIELARENNSDDRKKFINNLQ
KKNEATRKRINEIIGQTGNQNAKRIVEKIRLHDQQEGKCLYSLESIPLED
LLNNPNHYEVDHIIPRSVSFDNSYHNKVLVKQSENSKKSNLTPYQYFNSG
KSKLSYNQFKQHILNLSKSQDRISKKKKEYLLEERDINKFEVQKEFINRN
LVDTRYATRELTNYLKAYFSANNMNVKVKTINGSFTDYLRKVWKFKKERN
HGYKHHAEDALIIANADFLFKENKKLKAVNSVLEKPEIETKQLDIQVDSE
DNYSEMFIIPKQVQDIKDFRNFKYSHRVDKKPNRQLINDTLYSTRKKDNS
TYIVQTIKDIYAKDNTTLKKQFDKSPEKFLMYQHDPRTFEKLEVIMKQYA
NEKNPLAKYHEETGEYLTKYSKKNNGPIVKSLKYIGNKLGSHLDVTHQFK
SSTKKLVKLSIKPYRFDVYLTDKGYKFITISYLDVLKKDNYYYIPEQKYD
KLKLGKAIDKNAKFIASFYKNDLIKLDGEIYKIIGVNSDTRNMIELDLPD
IRYKEYCELNNIKGEPRIKKTIGKKVNSIEKLTTDVLGNVFTNTQYTKPQ
LLFKRGN.

[0300] In some embodiments, the Cas9 comprises an amino acid sequence that is at least 80%, 85%, 90%, 91%, 92%, 93%, 94%, 95%, 96%, 97%, 98%, 99% or 100% identical to the sequence of SEQ ID NO: 7024 (designated herein as sRGN3.1):

MNQKFILGLDIGITSVGYGLIDYETKNIIDAGVRLFPEANVENNEGRRSK
RGSRRLKRRRIHRLERVKLLLTEYDLINKEQIPTSNNPYQIRVKGLSEIL
SKDELAIALLHLAKRRGIHNVDVAADKEETASDSLSTKDQINKNAKFLES
RYVCELQKERLENEGHVRGVENRFLTKDIVREAKKIIDTQMQYYPEIDET
FKEKYISLVETRREYFEGPGQGSPFGWNGDLKKWYEMLMGHCTYFPQELR
SVKYAYSADLFNALNDLNNLIIQRDNSEKLEYHEKYHIIENVFKQKKKPT
LKQIAKEIGVNPEDIKGYRITKSGTPEFTSFKLFHDLKKVVKDHAILDDI
DLLNQIAEILTIYQDKDSIVAELGQLEYLMSEADKQSISELTGYTGTHSL
SLKCMNMIIDELWHSSMNQMEVFTYLNMRPKKYELKGYQRIPTDMIDDAI
LSPVVKRTFIQSINVINKVIEKYGIPEDIIIELARENNSDDRKKFINNLQ
KKNEATRKRINEIIGQTGNQNAKRIVEKIRLHDQQEGKCLYSLESIPLED
LLNNPNHYEVDHIIPRSVSFDNSYHNKVLVKQSENSKKSNLTPYQYFNSG
KSKLSYNQFKQHILNLSKSQDRISKKKKEYLLEERDINKFEVQKEFINRN
LVDTRYATRELTNYLKAYFSANNMNVKVKTINGSFTDYLRKVWKFKKERN
HGYKHHAEDALIIANADFLFKENKKLKAVNSVLEKPEIETKQLDIQVDSE
DNYSEMFIIPKQVQDIKDFRNFKYSHRVDKKPNRQLINDTLYSTRKKDNS
TYIVQTIKDIYAKDNTTLKKQFDKSPEKFLMYQHDPRTFEKLEVIMKQYA
NEKNPLAKYHEETGEYLTKYSKKNNGPIVKSLKYIGNKLGSHLDVTHQFK
SSTKKLVKLSIKNYRFDVYLTEKGYKFVTIAYLNVFKKDNYYYIPKDKYQ
ELKEKKKIKDTDQFIASFYKNDLIKLNGDLYKIIGVNSDDRNIIELDYYD
IKYKDYCEINNIKGEPRIKKTIGKKTESIEKFTTDVLGNLYLHSTEKAPQ
LIFKRGL.

[0301] In some embodiments, the Cas9 comprises an amino acid sequence that is encoded by a nucleic acid molecule at least 80%, 85%, 90%, 91%, 92%, 93%, 94%, 95%, 96%, 97%, 98%, 99% or 100% identical to the sequence of SEQ ID NO: 918 (an exemplary nucleic acid molecule encoding sRGN3.1):

ATGAATCAGAAATTCATCCTGGGACTGGACATCGGCATTACCTCTGTGGG
CTACGGCTTGATTGACTACGAGACCAAGAACATCATCGACGCCGGCGTTA
GACTGTTTCCTGAGGCCAATGTGGAAAACAACGAGGGCAGACGGTCTAAG
CGGGGCTCTAGACGACTGAAAAGAAGAAGAATCCACAGACTGGAAAGAGT
GAAGCTGCTGCTGACCGAGTACGACCTGATCAATAAGGAACAGATCCCTA
CAAGCAACAACCCCTACCAGATTAGAGTGAAGGGCCTGAGCGAGATCCTG
AGCAAAGACGAGCTGGCCATCGCCCTGCTGCACCTGGCCAAGCGGAGGGG
CATCCACAACGTGGATGTGGCCGCCGACAAGGAGGAAACCGCCAGCGACT
CCCTGAGCACCAAAGATCAGATCAACAAGAATGCCAAGTTCCTGGAGAGC
AGATACGTGTGCGAGCTGCAGAAGGAGAGATTGGAGAACGAGGGCCACGT
GCGGGGCGTGGAGAATAGATTCCTGACAAAAGATATCGTGCGGGAAGCCA
AGAAGATCATCGACACCCAGATGCAGTACTATCCTGAAATCGACGAAACC
TTCAAGGAGAAGTACATCAGCCTGGTCGAAACCAGACGCGAGTATTTCGA
GGGCCCCGGACAGGGCTCTCCTTTCGGCTGGAACGGCGATCTGAAGAAGT
GGTACGAGATGCTGATGGGACACTGCACCTACTTCCCTCAAGAGCTGAGA
TCTGTGAAGTACGCCTACAGCGCCGATCTGTTCAACGCCCTGAACGATCT
GAACAACCTTATCATCCAGCGGGACAATTCTGAGAAGCTGGAATACCACG
AGAAATATCATATCATCGAGAACGTCTTTAAACAAAAGAAAAAGCCTACC
CTGAAGCAGATCGCCAAGGAGATCGGAGTGAATCCTGAGGATATCAAAGG
CTACAGAATCACAAAGTCCGGCACCCCTGAGTTCACCAGCTTTAAGCTGT
TCCACGACCTGAAGAAGGTCGTGAAAGACCACGCCATCCTCGATGACATC
GATCTGCTGAACCAGATCGCTGAGATCCTGACAATCTACCAGGACAAAGA
TTCTATCGTGGCTGAACTGGGACAGCTGGAATACCTTATGAGCGAGGCCG
ACAAGCAAAGCATCTCCGAACTGACCGGCTACACGGGCACCCATAGCCTG
AGCCTGAAGTGTATGAACATGATCATCGATGAGCTGTGGCACTCTAGCAT
GAACCAGATGGAAGTTTTCACCTACCTGAACATGCGGCCTAAGAAGTACG
AGCTGAAGGGCTACCAGAGAATCCCCACCGATATGATCGACGACGCCATC
CTGAGCCCCGTGGTGAAAAGAACATTCATCCAGAGCATCAACGTGATCAA
CAAGGTGATCGAGAAGTACGGCATTCCAGAGGACATCATCATCGAGCTGG
CCAGAGAAAACAACAGCGACGATAGAAAGAAGTTTATCAACAACCTGCAG
AAAAAAAACGAGGCCACCCGGAAGAGAATTAATGAGATCATCGGCCAGAC
AGGCAACCAGAACGCCAAAAGGATCGTGGAAAAAATCAGACTGCACGACC
AGCAGGAGGGCAAGTGCCTGTACTCTCTGGAAAGCATCCCCCTGGAGGAC
CTGCTGAACAATCCAAATCACTACGAGGTGGACCACATCATCCCTAGAAG
CGTCAGCTTCGACAACAGCTACCACAACAAGGTGCTGGTGAAGCAGAGCG
AAAACAGTAAGAAATCCAACCTGACACCTTACCAGTACTTTAACAGCGGC
AAGAGCAAGCTGAGCTACAACCAGTTCAAGCAGCACATCCTGAACCTGTC
CAAATCTCAGGATAGAATCTCCAAGAAAAAGAAGGAATACCTGCTGGAGG
AGAGAGATATCAACAAGTTCGAAGTCCAAAAGGAGTTCATCAACAGGAAC
CTGGTGGACACCCGGTACGCCACAAGAGAGCTGACAAACTACCTGAAAGC
CTACTTCAGCGCTAACAACATGAACGTGAAGGTGAAAACCATCAATGGAA
GTTTCACAGACTACCTTCGGAAGGTGTGGAAGTTCAAGAAGGAACGGAAT
CACGGCTACAAGCACCACGCAGAGGACGCCCTGATTATAGCTAATGCCGA
TTTCCTGTTCAAAGAAAACAAGAAGCTGAAAGCCGTGAACAGCGTTCTGG
AAAAGCCTGAAATTGAGACCAAGCAACTGGATATACAGGTGGACAGCGAG
GACAACTACTCCGAGATGTTCATCATCCCTAAACAGGTGCAGGACATCAA
AGACTTCAGAAATTTCAAGTACAGCCACAGAGTGGACAAGAAACCCAACC
GGCAGCTGATCAATGACACCCTGTATAGCACCCGCAAGAAGGATAACAGC
ACCTACATCGTCCAGACCATCAAGGACATCTACGCTAAGGACAACACCAC
CCTGAAAAAGCAATTTGATAAGTCCCCCGAAAAGTTTCTGATGTACCAAC
ACGATCCTAGAACCTTCGAAAAGTTGGAGGTGATCATGAAGCAATATGCC
AACGAGAAGAACCCACTGGCCAAGTACCATGAGGAGACAGGAGAATACCT
GACCAAGTATTCTAAGAAGAATAACGGCCCCATCGTGAAGTCCCTGAAGT
ACATTGGGAACAAACTCGGAAGCCACCTGGACGTGACGCACCAGTTCAAG
AGCAGCACCAAGAAGCTAGTGAAACTGAGCATCAAGAACTACAGATTCGA
CGTGTACCTGACAGAAAAGGGCTACAAATTTGTGACCATCGCTTACCTGA
ATGTGTTCAAAAAGGACAATTATTACTACATCCCAAAGGACAAGTACCAG
GAGCTTAAAGAGAAAAAAAAGATCAAGGATACCGACCAGTTTATCGCTAG
CTTCTACAAGAACGACCTGATTAAGCTGAACGGCGACCTGTACAAGATCA
TCGGCGTGAACTCTGACGACCGGAACATAATAGAGCTGGATTATTATGAC
ATCAAGTACAAGGACTACTGCGAGATCAACAACATCAAGGGCGAGCCTAG
AATCAAAAAGACCATCGGGAAGAAAACCGAGTCTATCGAAAAGTTTACAA
CAGACGTGCTGGGCAACCTGTACCTGCACAGCACGGAAAAGGCCCCTCAG
CTCATCTTCAAGAGAGGCCTG

[0302] In some embodiments, the Cas9 comprises an amino acid sequence that is at least 80%, 85%, 90%, 91%, 92%, 93%, 94%, 95%, 96%, 97%, 98%, 99% or 100% identical to the sequence of SEQ ID NO: 7025 (designated herein as sRGN3.2):

MNQKFILGLDIGITSVGYGLIDYETKNIIDAGVRLFPEANVENNEGRRSK
RGSRRLKRRRIHRLERVKLLLTEYDLINKEQIPTSNNPYQIRVKGLSEIL
SKDELAIALLHLAKRRGIHNVDVAADKEETASDSLSTKDQINKNAKFLES
RYVCELQKERLENEGHVRGVENRFLTKDIVREAKKIIDTQMQYYPEIDET
FKEKYISLVETRREYFEGPGQGSPFGWNGDLKKWYEMLMGHCTYFPQELR
SVKYAYSADLFNALNDLNNLIIQRDNSEKLEYHEKYHIIENVFKQKKKPT
LKQIAKEIGVNPEDIKGYRITKSGTPEFTSFKLFHDLKKVVKDHAILDDI
DLLNQIAEILTIYQDKDSIVAELGQLEYLMSEADKQSISELTGYTGTHSL
SLKCMNMIIDELWHSSMNQMEVFTYLNMRPKKYELKGYQRIPTDMIDDAI
LSPVVKRTFIQSINVINKVIEKYGIPEDIIIELARENNSDDRKKFINNLQ
KKNEATRKRINEIIGQTGNQNAKRIVEKIRLHDQQEGKCLYSLESIPLED
LLNNPNHYEVDHIIPRSVSFDNSYHNKVLVKQSENSKKSNLTPYQYFNSG
KSKLSYNQFKQHILNLSKSQDRISKKKKEYLLEERDINKFEVQKEFINRN
LVDTRYATRELTNYLKAYFSANNMNVKVKTINGSFTDYLRKVWKFKKERN
HGYKHHAEDALIIANADFLFKENKKLKAVNSVLEKPEIETKQLDIQVDSE
DNYSEMFIIPKQVQDIKDFRNFKFSHRVDKKPNRQLINDTLYSTRMKDEH
DYIVQTITDIYGKDNTNLKKQFNKNPEKFLMYQNDPKTFEKLSIIMKQYS
DEKNPLAKYYEETGEYLTKYSKKNNGPIVKKIKLLGNKVGNHLDVTNKYE
NSTKKLVKLSIKNYRFDVYLTEKGYKFVTIAYLNVFKKDNYYYIPKDKYQ
ELKEKKKIKDTDQFIASFYKNDLIKLNGDLYKIIGVNSDDRNIIELDYYD
IKYKDYCEINNIKGEPRIKKTIGKKTESIEKFTTDVLGNLYLHSTEKAPQ
LIFKRGL.

[0303] In some embodiments, the Cas9 comprises an amino acid sequence that is at least 80%, 85%, 90%, 91%, 92%, 93%, 94%, 95%, 96%, 97%, 98%, 99% or 100% identical to the sequence of SEQ ID NO: 7026 (designated herein as sRGN3.3):

MNQKFILGLDIGITSVGYGLIDYETKNIIDAGVRLFPEANVENNEGRRSK
RGSRRLKRRRIHRLERVKLLLTEYDLINKEQIPTSNNPYQIRVKGLSEIL
SKDELAIALLHLAKRRGIHNVDVAADKEETASDSLSTKDQINKNAKFLES
RYVCELQKERLENEGHVRGVENRFLTKDIVREAKKIIDTQMQYYPEIDET
FKEKYISLVETRREYFEGPGQGSPFGWNGDLKKWYEMLMGHCTYFPQELR
SVKYAYSADLFNALNDLNNLIIQRDNSEKLEYHEKYHIIENVFKQKKKPT
LKQIAKEIGVNPEDIKGYRITKSGTPEFTSFKLFHDLKKVVKDHAILDDI
DLLNQIAEILTIYQDKDSIVAELGQLEYLMSEADKQSISELTGYTGTHSL
SLKCMNMIIDELWHSSMNQMEVFTYLNMRPKKYELKGYQRIPTDMIDDAI
LSPVVKRTFIQSINVINKVIEKYGIPEDIIIELARENNSDDRKKFINNLQ
KKNEATRKRINEIIGQTGNQNAKRIVEKIRLHDQQEGKCLYSLESIPLED
LLNNPNHYEVDHIIPRSVSFDNSYHNKVLVKQSENSKKSNLTPYQYFNSG
KSKLSYNQFKQHILNLSKSQDRISKKKKEYLLEERDINKFEVQKEFINRN
LVDTRYATRELTSYLKAYFSANNMDVKVKTINGSFTNHLRKVWRFDKYRN
HGYKHHAEDALIIANADFLFKENKKLQNTNKILEKPTIENNTKKVTVEKE
EDYNNVFETPKLVEDIKQYRDYKFSHRVDKKPNRQLINDTLYSTRMKDEH
DYIVQTITDIYGKDNTNLKKQFNKNPEKFLMYQNDPKTFEKLSIIMKQYS
DEKNPLAKYYEETGEYLTKYSKKNNGPIVKKIKLLGNKVGNHLDVTNKYE
NSTKKLVKLSIKNYRFDVYLTEKGYKFVTIAYLNVFKKDNYYYIPKDKYQ
ELKEKKKIKDTDQFIASFYKNDLIKLNGDLYKIIGVNSDDRNIIELDYYD
IKYKDYCEINNIKGEPRIKKTIGKKTESIEKFTTDVLGNLYLHSTEKAPQ
LIFKRGL.

[0304] In some embodiments, the Cas9 comprises an amino acid sequence that is encoded by a nucleic acid molecule at least 80%, 85%, 90%, 91%, 92%, 93%, 94%, 95%, 96%, 97%, 98%, 99% or 100% identical to the sequence of SEQ ID NO: 919 (an exemplary nucleic acid molecule encoding sRGN3.3):

AACCAGAAGTTTATCCTGGGCCTGGATATCGGCATCACATCCGTGGGCTA
CGGCCTGATTGATTACGAAACCAAGAACATCATTGATGCCGGCGTCCGGC
TTTTCCCTGAAGCTAACGTGGAAAACAATGAGGGCAGACGGAGCAAGAGA
GGCAGCAGACGGCTGAAGCGGAGAAGAATCCATAGACTCGAACGGGTGAA
GCTGCTGCTGACCGAGTACGACCTGATCAACAAGGAGCAGATCCCCACCA
GCAACAACCCATACCAGATCAGAGTGAAAGGCCTTTCTGAGATTCTGAGC
AAGGATGAGCTGGCTATCGCTCTGCTCCACCTGGCCAAGAGAAGGGGAAT
CCACAACGTTGACGTGGCCGCCGATAAGGAAGAGACCGCCAGCGATAGCC
TGAGCACCAAGGACCAGATCAACAAGAACGCCAAGTTCCTGGAAAGCAGA
TACGTGTGCGAGCTGCAAAAAGAGAGACTGGAAAATGAGGGCCATGTGCG
GGGCGTTGAGAACAGATTCCTGACCAAAGACATCGTCAGAGAGGCCAAGA
AAATTATTGACACCCAGATGCAGTACTATCCTGAGATAGACGAGACCTTT
AAGGAAAAGTACATCAGCCTGGTGGAAACAAGAAGAGAATACTTCGAAGG
ACCTGGCCAGGGCTCCCCTTTCGGCTGGAACGGCGACCTGAAGAAGTGGT
ACGAGATGCTGATGGGCCACTGCACCTACTTCCCCCAGGAGCTGCGGAGC
GTGAAGTACGCTTACAGCGCCGACCTGTTCAATGCCCTGAACGACCTGAA
CAATCTTATCATCCAAAGAGATAACAGCGAGAAATTAGAATACCACGAGA
AGTACCACATCATCGAGAATGTGTTCAAGCAAAAGAAGAAGCCTACCCTG
AAGCAGATCGCCAAAGAGATCGGCGTGAACCCTGAGGACATCAAGGGCTA
TCGGATCACCAAGTCCGGCACCCCTGAATTCACCAGCTTCAAGCTGTTTC
ACGACCTCAAAAAGGTCGTGAAGGACCACGCCATCCTGGACGACATCGAT
CTGCTGAATCAGATCGCCGAGATCCTGACCATCTACCAGGACAAGGACTC
TATCGTGGCCGAGCTTGGACAGCTGGAGTACCTGATGAGCGAGGCTGACA
AGCAGAGCATCAGCGAGCTGACCGGCTACACCGGAACCCACAGCCTGTCC
CTGAAGTGCATGAACATGATCATCGACGAGCTGTGGCACTCTAGCATGAA
CCAGATGGAAGTGTTCACCTACCTGAACATGAGACCTAAGAAGTACGAAC
TGAAGGGTTACCAGAGAATCCCAACCGACATGATCGACGACGCCATCCTG
AGCCCCGTGGTGAAGCGGACCTTTATCCAGAGCATCAATGTGATCAACAA
GGTGATCGAGAAATACGGCATCCCCGAGGACATCATCATCGAACTGGCCA
GAGAGAATAACTCTGATGACCGGAAGAAGTTCATCAACAACCTGCAGAAG
AAGAACGAAGCCACCAGAAAGCGCATCAACGAGATCATCGGCCAAACAGG
GAATCAGAACGCCAAGAGGATCGTGGAAAAGATTCGGCTGCACGACCAGC
AGGAGGGAAAATGCCTGTACAGCCTGGAAAGCATCCCCCTGGAAGATCTA
CTGAACAACCCCAACCACTACGAGGTGGATCACATCATCCCTAGAAGCGT
GTCCTTTGACAACAGTTACCACAACAAGGTGCTGGTGAAGCAATCCGAGA
ACTCGAAGAAGAGCAACCTGACACCTTACCAGTACTTTAACAGCGGCAAG
TCCAAGCTGTCTTATAACCAGTTCAAGCAGCACATCCTCAACCTGTCAAA
GTCTCAGGACAGAATCTCTAAGAAGAAGAAGGAGTATCTGCTGGAAGAGC
GGGACATCAACAAGTTCGAGGTGCAGAAAGAGTTCATTAACAGAAACCTG
GTCGACACCCGGTACGCCACACGCGAACTGACAAGCTACCTGAAGGCCTA
CTTCTCCGCCAACAATATGGACGTGAAGGTCAAGACCATCAATGGCAGCT
TCACAAATCACCTGAGAAAGGTCTGGCGGTTCGACAAGTACAGAAACCAC
GGCTACAAGCACCACGCCGAGGATGCTCTGATTATCGCCAACGCCGACTT
CCTGTTCAAGGAAAACAAAAAACTGCAGAACACCAACAAGATCCTGGAAA
AACCTACAATCGAGAACAACACAAAGAAAGTGACAGTGGAAAAAGAGGAA
GATTACAACAACGTGTTTGAGACACCTAAGCTGGTTGAGGATATCAAGCA
GTACCGGGACTATAAGTTTAGCCACAGAGTGGACAAGAAACCTAACAGGC
AGCTGATCAACGACACTCTGTACAGCACAAGAATGAAAGATGAGCACGAT
TACATCGTGCAGACCATTACCGACATCTACGGCAAGGACAACACCAATCT
GAAGAAGCAGTTCAACAAAAATCCCGAGAAGTTCCTGATGTACCAAAATG
ACCCTAAGACATTCGAGAAGCTGAGCATCATCATGAAACAGTACTCTGAT
GAGAAGAACCCACTGGCCAAGTACTACGAGGAAACAGGCGAATACCTGAC
CAAGTACTCTAAGAAGAACAACGGCCCTATCGTGAAGAAGATCAAACTGC
TGGGCAACAAAGTGGGAAATCATCTGGATGTGACCAATAAATACGAGAAC
TCTACAAAGAAACTGGTGAAGCTGAGCATTAAGAACTACAGATTCGACGT
CTACCTGACAGAAAAGGGATACAAGTTCGTGACCATCGCCTACCTGAACG
TGTTCAAGAAAGACAACTACTACTACATCCCAAAAGACAAGTACCAAGAG
TTAAAAGAGAAGAAGAAGATAAAGGATACCGACCAGTTTATCGCTTCTTT
CTACAAGAACGACCTGATCAAGCTGAACGGTGATCTGTACAAAATCATCG
GAGTGAATAGCGATGACAGAAATATCATCGAACTGGATTACTATGACATC
AAGTACAAAGATTATTGTGAAATCAACAACATCAAGGGAGAGCCCAGAAT
TAAGAAAACCATCGGCAAGAAAACAGAGAGCATCGAGAAATTCACCACAG
ATGTGCTGGGCAACCTGTACCTGCACAGCACAGAGAAAGCCCCTCAGCTC
ATCTTCAAGAGAGGCCTG

[0305] In some embodiments, the Cas9 comprises an amino acid sequence that is at least 80%, 85%, 90%, 91%, 92%, 93%, 94%, 95%, 96%, 97%, 98%, 99% or 100% identical to the sequence of SEQ ID NO: 7027 (designated herein as sRGN4):

MNQKFILGLDIGITSVGYGLIDYETKNIIDAGVRLFPEANVENNEGRRSK
RGSRRLKRRRIHRLERVKKLLEDYNLLDQSQIPQSTNPYAIRVKGLSEAL
SKDELVIALLHIAKRRGIHNINVSSEDEDASNELSTKEQINRNNKLLKDK
YVCEVQLQRLKEGQIRGEKNRFKTTDILKEIDQLLKVQKDYHNLDIDFIN
QYKEIVETRREYFEGPGKGSPYGWEGDPKAWYETLMGHCTYFPDELRSVK
YAYSADLFNALNDLNNLVIQRDGLSKLEYHEKYHIIENVFKQKKKPTLKQ
IANEINVNPEDIKGYRITKSGKPEFTSFKLFHDLKKVVKDHAILDDIDLL
NQIAEILTIYQDKDSIVAELGQLEYLMSEADKQSISELTGYTGTHSLSLK
CMNMIIDELWHSSMNQMEVFTYLNMRPKKYELKGYQRIPTDMIDDAILSP
VVKRTFIQSINVINKVIEKYGIPEDIIIELARENNSDDRKKFINNLQKKN
EATRKRINEIIGQTGNQNAKRIVEKIRLHDQQEGKCLYSLESIPLEDLLN
NPNHYEVDHIIPRSVSFDNSYHNKVLVKQSENSKKSNLTPYQYFNSGKSK
LSYNQFKQHILNLSKSQDRISKKKKEYLLEERDINKFEVQKEFINRNLVD
TRYATRELTNYLKAYFSANNMNVKVKTINGSFTDYLRKVWKFKKERNHGY
KHHAEDALIIANADFLFKENKKLKAVNSVLEKPEIETKQLDIQVDSEDNY
SEMFIIPKQVQDIKDFRNFKYSHRVDKKPNRQLINDTLYSTRKKDNSTYI
VQTIKDIYAKDNTTLKKQFDKSPEKFLMYQHDPRTFEKLEVIMKQYANEK
NPLAKYHEETGEYLTKYSKKNNGPIVKSLKYIGNKLGSHLDVTHQFKSST
KKLVKLSIKPYRFDVYLTDKGYKFITISYLDVLKKDNYYYIPEQKYDKLK
LGKAIDKNAKFIASFYKNDLIKLDGEIYKIIGVNSDTRNMIELDLPDIRY
KEYCELNNIKGEPRIKKTIGKKVNSIEKLTTDVLGNVFTNTQYTKPQLLF
KRGN.

[0306] In some embodiments, the Cas9 comprises an amino acid sequence that is encoded by a nucleic acid molecule at least 80%, 85%, 90%, 91%, 92%, 93%, 94%, 95%, 96%, 97%, 98%, 99% or 100% identical to the sequence of SEQ ID NO: 920 (an exemplary nucleic acid molecule encoding sRGN4):

ATGAATCAAAAGTTTATCCTGGGTCTGGACATCGGCATCACATCTGTGGG
CTACGGCCTTATCGATTACGAGACCAAGAATATCATTGATGCTGGCGTAC
GGCTGTTCCCTGAGGCTAACGTGGAAAACAACGAGGGTAGACGGAGCAAG
AGAGGCAGCAGACGGCTGAAACGGCGTAGAATCCACCGGCTGGAGAGAGT
GAAGAAGTTGCTGGAAGATTACAACTTGCTGGATCAATCCCAGATCCCCC
AGAGCACTAATCCTTATGCTATCCGGGTGAAGGGCCTGTCTGAAGCCCTG
AGCAAAGACGAGCTGGTGATTGCCCTGCTGCACATCGCGAAGAGAAGAGG
CATCCACAATATCAATGTGTCCTCTGAGGATGAGGATGCCAGCAACGAGC
TGAGCACTAAGGAACAGATCAATCGGAACAACAAGCTGCTGAAGGACAAG
TACGTGTGTGAAGTGCAGCTGCAGAGACTGAAGGAAGGCCAGATAAGAGG
CGAAAAGAACAGATTCAAGACAACAGACATCCTGAAAGAAATCGACCAGC
TGCTGAAGGTCCAGAAGGACTACCACAACCTCGACATCGATTTCATTAAC
CAGTACAAGGAAATCGTGGAAACCAGGAGAGAGTACTTCGAGGGCCCTGG
CAAGGGCTCCCCATACGGCTGGGAGGGCGACCCCAAGGCCTGGTACGAAA
CCCTGATGGGCCACTGCACCTACTTCCCCGACGAACTGAGAAGCGTCAAG
TACGCCTACAGCGCCGATCTGTTCAACGCCCTGAACGACCTGAACAACCT
GGTGATCCAGCGGGACGGCCTGAGCAAACTGGAGTACCATGAAAAGTATC
ATATCATCGAGAACGTGTTCAAGCAGAAGAAAAAACCTACCCTGAAGCAG
ATCGCCAACGAGATCAACGTGAACCCTGAGGACATTAAAGGCTACAGAAT
CACCAAAAGCGGCAAGCCAGAGTTCACCAGCTTCAAGCTGTTTCACGACC
TGAAGAAGGTCGTGAAAGACCACGCCATCCTGGACGACATCGATCTGCTT
AACCAGATCGCTGAAATCCTCACAATCTACCAGGACAAGGACTCTATCGT
GGCCGAGCTGGGACAGCTGGAATACCTGATGAGCGAGGCCGATAAGCAGA
GCATCAGCGAGCTGACCGGCTACACCGGAACCCACAGCCTGAGCCTGAAG
TGTATGAACATGATCATCGACGAGCTGTGGCACAGCTCTATGAACCAGAT
GGAAGTATTCACCTACCTGAACATGAGACCTAAGAAGTACGAACTGAAGG
GCTATCAGAGAATCCCTACAGACATGATCGACGATGCCATCCTGTCTCCT
GTGGTGAAGAGAACCTTCATCCAGTCTATCAACGTGATCAACAAGGTGAT
CGAAAAGTACGGAATCCCTGAAGATATCATCATCGAACTGGCCAGAGAGA
ACAACTCCGACGACAGAAAGAAATTCATCAACAACCTGCAGAAGAAGAAT
GAGGCCACACGGAAGCGGATTAATGAGATCATCGGCCAAACCGGCAACCA
GAACGCCAAAAGAATCGTGGAAAAGATCCGGCTGCACGATCAGCAGGAGG
GCAAATGCCTGTACAGCCTGGAGAGCATCCCCCTGGAGGACCTGCTCAAC
AACCCCAACCACTACGAGGTGGATCACATCATCCCAAGATCTGTTAGCTT
CGACAACAGCTACCACAACAAGGTGCTGGTGAAGCAAAGCGAAAACTCTA
AGAAATCTAACCTGACACCTTACCAGTACTTTAACAGCGGCAAGTCCAAG
CTGTCTTATAACCAGTTTAAGCAGCACATCCTGAACCTGAGCAAGTCCCA
GGATAGAATCAGCAAAAAAAAGAAGGAATACCTGCTGGAGGAACGCGACA
TCAATAAATTTGAGGTGCAAAAGGAGTTCATCAACCGGAACCTGGTGGAC
ACCCGGTACGCCACCAGAGAACTGACCAACTACCTGAAAGCCTACTTCAG
CGCCAACAACATGAACGTGAAGGTGAAAACCATCAACGGAAGCTTCACCG
ACTACCTGCGGAAGGTGTGGAAGTTCAAGAAAGAGCGGAATCACGGCTAT
AAGCACCACGCTGAGGACGCTCTGATCATCGCCAATGCCGATTTCCTGTT
CAAGGAAAACAAGAAGTTAAAGGCCGTGAACTCTGTCCTGGAGAAGCCCG
AGATCGAGACAAAGCAGCTGGACATCCAAGTGGACTCAGAGGACAATTAC
TCTGAGATGTTCATCATCCCCAAGCAGGTGCAGGACATCAAGGATTTTAG
AAATTTCAAGTACAGCCATAGAGTGGACAAGAAGCCCAATAGACAGCTGA
TCAACGATACACTGTACAGCACCAGAAAGAAGGACAACAGCACATATATC
GTCCAGACCATCAAGGACATTTACGCAAAGGATAACACCACACTGAAGAA
GCAGTTCGACAAAAGCCCTGAGAAGTTCCTGATGTACCAACACGACCCTC
GGACCTTCGAGAAGTTAGAGGTTATCATGAAACAGTACGCCAACGAGAAA
AACCCTCTGGCCAAGTACCACGAGGAAACCGGAGAATACCTGACAAAATA
TAGCAAGAAGAACAACGGCCCCATCGTGAAAAGCCTGAAGTACATCGGCA
ACAAGCTGGGCAGCCACCTGGACGTGACCCACCAGTTCAAGAGCAGCACC
AAGAAGCTGGTCAAGCTGAGCATCAAGCCTTATAGGTTCGACGTGTACCT
GACAGATAAGGGATACAAGTTCATCACCATCAGCTACCTGGATGTTCTGA
AAAAGGACAATTACTACTACATCCCTGAGCAGAAGTACGACAAACTCAAG
CTGGGCAAGGCCATCGATAAGAATGCCAAGTTCATCGCATCTTTTTACAA
GAACGACCTGATCAAACTGGACGGCGAGATCTACAAGATCATAGGAGTGA
ACAGCGACACCAGGAATATGATCGAGCTCGATCTGCCTGACATCAGATAC
AAGGAATACTGCGAGCTGAACAACATCAAGGGAGAGCCTAGAATCAAGAA
AACCATCGGCAAGAAGGTGAACAGCATCGAGAAACTTACAACAGATGTGC
TCGGCAACGTGTTCACCAACACCCAGTACACCAAGCCACAGCTGCTGTTT
AAGCGGGGGAAC

[0307] In some embodiments, the Cas9 comprises an amino acid sequence that is at least 80%, 85%, 90%, 91%, 92%, 93%, 94%, 95%, 96%, 97%, 98%, 99% or 100% identical to the sequence of SEQ ID NO: 7028 (designated herein as Staphylococcus hyicus Cas9 or ShyCas9):

MNNYILGLDIGITSVGYGIVDSDTREIKDAGVRLFPEANVDNNEGRRSKR
GARRLKRRRIHRLDRVKHLLAEYDLLDLTNIPKSTNPYQTRVKGLNEKLS
KDELVIALLHIAKRRGIHNVNVMMDDNDSGNELSTKDQLKKNAKALSDKY
VCELQLERFEQDYKVRGEKNRFKTEDFVREARKLLETQSKFFEIDQTFIM
RYIELIETRREYFEGPGKGSPFGWEGNIKKWFEQMMGHCTYFPEELRSVK
YSYSAELFNALNDLNNLVITRDEDAKLNYGEKFQIIENVFKQKKTPNLKQ
IAIEIGVHETEIKGYRVNKSGKPEFTQFKLYHDLKNIFKDPKYLNDIQLM
DNIAEIITIYQDAESIIKELNQLPELLSEREKEKISALSGYSGTHRLSLK
CINLLLDDLWESSLNQMELFTKLNLKPKKIDLSQQHKIPSKLVDDFILSP
VVKRAFIQSIQVVNAIIDKYGLPEDIIIELARENNSDDRRKFLNQLQKQN
EETRKQVEKVLREYGNDNAKRIVQKIKLHNMQEGKCLYSLKDIPLEDLLR
NPHHYEVDHIIPRSVAFDNSMHNKVLVRADENSKKGNRTPYQYLNSSESS
LSYNEFKQHILNLSKTKDRITKKKREYLLEERDINKFDVQKEFINRNLVD
TRYATRELTSLLKAYFSANNLDVKVKTINGSFTNYLRKVWKFDKDRNKGY
KHHAEDALIIANADFLFKHNKKLRNINKVLDAPSKEVDKKRVTVQSEDEY
NQIFEDTQKAQAIKKFEIRKFSHRVDKKPNRQLINDTLYSTRNIDGIEYV
VESIKDIYSVNNDKVKTKFKKDPHRLLMYRNDPQTFEKFEKVFKQYESEK
NPFAKYYEETGEKIRKFSKTGQGPYINKIKYLRERLGRHCDVTNKYINSR
NKIVQLKIYSYRFDIYQYGNNYKMITISYIDLEQKSNYYYISREKYEQKK
KDKQIDDSYKFIGSFYKNDIINYNGEMYRVIGVNDSEKNKIQLDMIDISI
KDYMELNNIKKTGVIYKTIGKSTTHIEKYTTDILGNLYKAAPPKKPQLIF
K.

[0308] In some embodiments, the Cas9 comprises an amino acid sequence that is at least 80%, 85%, 90%, 91%, 92%, 93%, 94%, 95%, 96%, 97%, 98%, 99% or 100% identical to the sequence of SEQ ID NO: 7029 (designated herein as Staphylococcus microti Cas9 or Smi Cas9):

MEKDYILGLDIGIGSVGYGLIDYDTKSIIDAGVRLFPEANADNNLGRRAK
RGARRLKRRRIHRLERVKSLLSEYKIISGLAPTNNQPYNIRVKGLTEQLT
KDELAVALLHIAKRRGIHNVDVAADKEETASDSLSTKDQINKNAKFLESR
YVCELQKERLENEGHVRGVENRFLTKDIVREAKKIIDTQMQYYPEIDETF
KEKYISLVETRREYYEGPGKGSPYGWDADVKKWYQLMMGHCTYFPVEFRS
VKYAYTADLYNALNDLNNLTIARDDNPKLEYHEKYHIIENVFKQKRNPTL
KQIAKEIGVNDINISGYRVTKSGKPQFTSFKLFHDLKKVVKDHAILDDID
LLNQIAEILTIYQDKDSIVAELGQLEYLMSEADKQSISELTGYTGTHSLS
LKCMNMIIDELWHSSMNQMEVFTYLNMRPKKYELKGYQRIPTDMIDDAIL
SPVVKRSFKQAIGVVNAIIKKYGLPKDIIIELARESNSAEKSRYLRAIQK
KNEKTRERIEAIIKEYGNENAKGLVQKIKLHDAQEGKCLYSLKDIPLEDL
LRNPNNYDIDHIIPRSVSFDDSMHNKVLVRREQNAKKNNQTPYQYLTSGY
ADIKYSVFKQHVLNLAENKDRMTKKKREYLLEERNINKYDVQKEFINRNL
VDTRYTTRELTTLLKTYFTINNLDVKVKTINGSFTDFLRKRWGFKKNRDE
GYKHHAEDALIIANADYLFKEHKLLKEIKDVSDLAGDERNSNVKDEDQYE
EVFGGYFKIEDIKKYKIKKFSHRVDKKPNRQLINDTIYSTRVKDDKRYLI
NTLKNLYDKSNGDLKERMQKDPESLLMYHHDPQTFEKLKIVMSQYENEKN
PLAKYFEETGQYLTKYAKHDNGPAIHKIKYYGNKLVEHLDITKNYHNPQN
KVVQLSQKSFRFDVYQTDKGYKFISIAYLTLKNEKNYYAISQEKYDQLKS
EKKISNNAVFIGSFYTSDIIEINNEKFRVIGVNSDKNNLIEVDRIDIRQK
EFIELEEEKKNNRIKVTIGRKTTNIEKFHTDILGNMYKSKRPKAPQLVFK
KG.

[0309] In some embodiments, the Cas9 comprises an amino acid sequence that is at least 80%, 85%, 90%, 91%, 92%, 93%, 94%, 95%, 96%, 97%, 98%, 99% or 100% identical to the sequence of SEQ ID NO: 7030 (designated herein as Staphylococcus pasteuri Cas9 or Spa Cas9):

MKEKYILGLDLGITSVGYGIINFETKKIIDAGVRLFPEANVDNNEGRRSK
RGSRRLKRRRIHRLERVKLLLTEYDLINKEQIPTSNNPYQIRVKGLSEIL
SKDELAIALLHLAKRRGIHNINVSSEDEDASNELSTKEQINRNNKLLKDK
YVCEVQLQRLKEGQIRGEKNRFKTTDILKEIDQLLKVQKDYHNLDIDFIN
QYKEIVETRREYFEGPGQGSPFGWNGDLKKWYEMLMGHCTYFPQELRSVK
YAYSADLFNALNDLNNLIIQRDNSEKLEYHEKYHIIENVFKQKKKPTLKQ
IAKEIGVNPEDIKGYRITKSGTPQFTEFKLYHDLKSIVFDKSILENEAIL
DQIAEILTIYQDEQSIKEELNKLPEILNEQDKAEIAKLIGYNGTHRLSLK
CIHLINEELWQTSRNQMEIFNYLNIKPNKVDLSEQNKIPKDMVNDFILSP
VVKRTFIQSINVINKVIEKYGIPEDIIIELARENNSDDRKKFINNLQKKN
EATRKRINEIIGQTGNQNAKRIVEKIRLHDQQEGKCLYSLESIALMDLLN
NPQNYEVDHIIPRSVAFDNSIHNKVLVKQIENSKKGNRTPYQYLNSSDAK
LSYNQFKQHILNLSKSKDRISKKKKDYLLEERDINKFEVQKEFINRNLVD
TRYATRELTSYLKAYFSANNMDVKVKTINGSFTNHLRKVWRFDKYRNHGY
KHHAEDALIIANADFLFKENKKLQNTNKILEKPTIENNTKKVTVEKEEDY
NNVFETPKLVEDIKQYRDYKFSHRVDKKPNRQLINDTLYSTRMKDEHDYI
VQTITDIYGKDNTNLKKQFNKNPEKFLMYQNDPKTFEKLSIIMKQYSDEK
NPLAKYYEETGEYLTKYSKKNNGPIVKKIKLLGNKVGNHLDVTNKYENST
KKLVKLSIKNYRFDVYLTEKGYKFVTIAYLNVFKKDNYYYIPKDKYQELK
EKKKIKDTDQFIASFYKNDLIKLNGDLYKIIGVNSDDRNIIELDYYDIKY
KDYCEINNIKGEPRIKKTIGKKTESIEKFTTDVLGNLYLHSTEKAPQLIF
KRGL.

[0310] In some embodiments, the Cas protein comprises an amino acid sequence that is at least 80%, 85%, 90%, 91%, 92%, 93%, 94%, 95%, 96%, 97%, 98%, 99% or 100% identical to the sequence of SEQ ID NO: 7031 (designated herein as Cas12i1):

MSNKEKNASETRKAYTTKMIPRSHDRMKLLGNFMDYLMDGTPIFFELWNQ
FGGGIDRDIISGTANKDKISDDLLLAVNWFKVMPINSKPQGVSPSNLANL
FQQYSGSEPDIQAQEYFASNFDTEKHQWKDMRVEYERLLAELQLSRSDMH
HDLKLMYKEKCIGLSLSTAHYITSVMFGTGAKNNRQTKHQFYSKVIQLLE
ESTQINSVEQLASIILKAGDCDSYRKLRIRCSRKGATPSILKIVQDYELG
TNHDDEVNVPSLIANLKEKLGRFEYECEWKCMEKIKAFLASKVGPYYLGS
YSAMLENALSPIKGMTTKNCKFVLKQIDAKNDIKYENEPFGKIVEGFFDS
PYFESDTNVKWVLHPHHIGESNIKTLWEDLNAIHSKYEEDIASLSEDKKE
KRIKVYQGDVCQTINTYCEEVGKEAKTPLVQLLRYLYSRKDDIAVDKIID
GITFLSKKHKVEKQKINPVIQKYPSFNFGNNSKLLGKIISPKDKLKHNLK
CNRNQVDNYIWIEIKVLNTKTMRWEKHHYALSSTRFLEEVYYPATSENPP
DALAARFRTKTNGYEGKPALSAEQIEQIRSAPVGLRKVKKRQMRLEAARQ
QNLLPRYTWGKDFNINICKRGNNFEVTLATKVKKKKEKNYKVVLGYDANI
VRKNTYAAIEAHANGDGVIDYNDLPVKPIESGFVTVESQVRDKSYDQLSY
NGVKLLYCKPHVESRRSFLEKYRNGTMKDNRGNNIQIDFMKDFEAIADDE
TSLYYFNMKYCKLLQSSIRNHSSQAKEYREEIFELLRDGKLSVLKLSSLS
NLSFVMFKVAKSLIGTYFGHLLKKPKNSKSDVKAPPITDEDKQKADPEMF
ALRLALEEKRLNKVKSKKEVIANKIVAKALELRDKYGPVLIKGENISDTT
KKGKKSSTNSFLMDWLARGVANKVKEMVMMHQGLEFVEVNPNFTSHQDPF
VHKNPENTFRARYSRCTPSELTEKNRKEILSFLSDKPSKRPTNAYYNEGA
MAFLATYGLKKNDVLGVSLEKFKQIMANILHQRSEDQLLFPSRGGMFYLA
TYKLDADATSVNWNGKQFWVCNADLVAAYNVGLVDIQKDFKKK.

[0311] In some embodiments, the Cas protein comprises an amino acid sequence that is at least 80%, 85%, 90%, 91%, 92%, 93%, 94%, 95%, 96%, 97%, 98%, 99% or 100% identical to the sequence of SEQ ID NO: 7032 (designated herein as Cas12i2):

MSSAIKSYKSVLRPNERKNQLLKSTIQCLEDGSAFFFKMLQGLFGGITPE
IVRFSTEQEKQQQDIALWCAVNWFRPVSQDSLTHTIASDNLVEKFEEYYG
GTASDAIKQYFSASIGESYYWNDCRQQYYDLCRELGVEVSDLTHDLEILC
REKCLAVATESNQNNSIISVLFGTGEKEDRSVKLRITKKILEAISNLKEI
PKNVAPIQEIILNVAKATKETFRQVYAGNLGAPSTLEKFIAKDGQKEFDL
KKLQTDLKKVIRGKSKERDWCCQEELRSYVEQNTIQYDLWAWGEMFNKAH
TALKIKSTRNYNFAKQRLEQFKEIQSLNNLLVVKKLNDFFDSEFFSGEET
YTICVHHLGGKDLSKLYKAWEDDPADPENAIVVLCDDLKNNFKKEPIRNI
LRYIFTIRQECSAQDILAAAKYNQQLDRYKSQKANPSVLGNQGFTWTNAV
ILPEKAQRNDRPNSLDLRIWLYLKLRHPDGRWKKHHIPFYDTRFFQEIYA
AGNSPVDTCQFRTPRFGYHLPKLTDQTAIRVNKKHVKAAKTEARIRLAIQ
QGTLPVSNLKITEISATINSKGQVRIPVKFDVGRQKGTLQIGDRFCGYDQ
NQTASHAYSLWEVVKEGQYHKELGCFVRFISSGDIVSITENRGNQFDQLS
YEGLAYPQYADWRKKASKFVSLWQITKKNKKKEIVTVEAKEKFDAICKYQ
PRLYKFNKEYAYLLRDIVRGKSLVELQQIRQEIFRFIEQDCGVTRLGSLS
LSTLETVKAVKGIIYSYFSTALNASKNNPISDEQRKEFDPELFALLEKLE
LIRTRKKKQKVERIANSLIQTCLENNIKFIRGEGDLSTTNNATKKKANSR
SMDWLARGVFNKIRQLAPMHNITLFGCGSLYTSHQDPLVHRNPDKAMKCR
WAAIPVKDIGDWVLRKLSQNLRAKNIGTGEYYHQGVKEFLSHYELQDLEE
ELLKWRSDRKSNIPCWVLQNRLAEKLGNKEAVVYIPVRGGRIYFATHKVA
TGAVSIVFDQKQVWVCNADHVAAANIALTVKGIGEQSSDEENPDGSRIKL
QLTS.

### Modified Guide RNAs

[0312] In some embodiments, the guide RNA is chemically modified. A guide RNA comprising one or more modified nucleosides or nucleotides is called a “modified” guide RNA or “chemically modified” guide RNA, to describe the presence of one or more non-naturally and/or naturally occurring components or configurations that are used instead of or in addition to the canonical A, G, C, and U residues. In some embodiments, a modified guide RNA is synthesized with a non-canonical nucleoside or nucleotide, is here called “modified.” Modified nucleosides and nucleotides can include one or more of: (i) alteration, e.g., replacement, of one or both of the non-linking phosphate oxygens and/or of one or more of the linking phosphate oxygens in the phosphodiester backbone linkage (an exemplary backbone modification); (ii) alteration, e.g., replacement, of a constituent of the ribose sugar, e.g., of the 2′ hydroxyl on the ribose sugar (an exemplary sugar modification); (iii) wholesale replacement of the phosphate moiety with “dephospho” linkers (an exemplary backbone modification); (iv) modification or replacement of a naturally occurring nucleobase, including with a non-canonical nucleobase (an exemplary base modification); (v) replacement or modification of the ribose-phosphate backbone (an exemplary backbone modification); (vi) modification of the 3′ end or 5′ end of the oligonucleotide, e.g., removal, modification or replacement of a terminal phosphate group or conjugation of a moiety, cap or linker (such 3′ or 5′ cap modifications may comprise a sugar and/or backbone modification); and (vii) modification or replacement of the sugar (an exemplary sugar modification).

[0313] Chemical modifications such as those listed above can be combined to provide modified guide RNAs comprising nucleosides and nucleotides (collectively “residues”) that can have two, three, four, or more modifications. For example, a modified residue can have a modified sugar and a modified nucleobase, or a modified sugar and a modified phosphodiester. In some embodiments, every base of a guide RNA is modified, e.g., all bases have a modified phosphate group, such as a phosphorothioate group. In certain embodiments, all, or substantially all, of the phosphate groups of a guide RNA molecule are replaced with phosphorothioate groups. In some embodiments, modified guide RNAs comprise at least one modified residue at or near the 5′ end of the RNA. In some embodiments, modified guide RNAs comprise at least one modified residue at or near the 3′ end of the RNA.

[0314] In some embodiments, the guide RNA comprises one, two, three or more modified residues. In some embodiments, at least 5% (e.g., at least 5%, at least 10%, at least 15%, at least 20%, at least 25%, at least 30%, at least 35%, at least 40%, at least 45%, at least 50%, at least 55%, at least 60%, at least 65%, at least 70%, at least 75%, at least 80%, at least 85%, at least 90%, at least 95%, or 100%) of the positions in a modified guide RNA are modified nucleosides or nucleotides.

[0315] Unmodified nucleic acids can be prone to degradation by, e.g., intracellular nucleases or those found in serum. For example, nucleases can hydrolyze nucleic acid phosphodiester bonds. Accordingly, in one aspect the guide RNAs described herein can contain one or more modified nucleosides or nucleotides, e.g., to introduce stability toward intracellular or serum-based nucleases. In some embodiments, the modified guide RNA molecules described herein can exhibit a reduced innate immune response when introduced into a population of cells, both in vivo and ex vivo. The term “innate immune response” includes a cellular response to exogenous nucleic acids, including single stranded nucleic acids, which involves the induction of cytokine expression and release, particularly the interferons, and cell death.

[0316] In some embodiments of a backbone modification, the phosphate group of a modified residue can be modified by replacing one or more of the oxygens with a different substituent. Further, the modified residue, e.g., modified residue present in a modified nucleic acid, can include the wholesale replacement of an unmodified phosphate moiety with a modified phosphate group as described herein. In some embodiments, the backbone modification of the phosphate backbone can include alterations that result in either an uncharged linker or a charged linker with unsymmetrical charge distribution.

[0317] Examples of modified phosphate groups include, phosphorothioate, phosphoroselenates, borano phosphates, borano phosphate esters, hydrogen phosphonates, phosphoroamidates, alkyl or aryl phosphonates and phosphotriesters. The phosphorous atom in an unmodified phosphate group is achiral. However, replacement of one of the non-bridging oxygens with one of the above atoms or groups of atoms can render the phosphorous atom chiral. The stereogenic phosphorous atom can possess either the “R” configuration (herein Rp) or the “S” configuration (herein Sp). The backbone can also be modified by replacement of a bridging oxygen, (i.e., the oxygen that links the phosphate to the nucleoside), with nitrogen (bridged phosphoroamidates), sulfur (bridged phosphorothioates) and carbon (bridged methylenephosphonates). The replacement can occur at either linking oxygen or at both of the linking oxygens.

[0318] The phosphate group can be replaced by non-phosphorus containing connectors in certain backbone modifications. In some embodiments, the charged phosphate group can be replaced by a neutral moiety. Examples of moieties which can replace the phosphate group can include, without limitation, e.g., methyl phosphonate, hydroxylamino, siloxane, carbonate, carboxymethyl, carbamate, amide, thioether, ethylene oxide linker, sulfonate, sulfonamide, thioformacetal, formacetal, oxime, methyleneimino, methylenemethylimino, methylenehydrazo, methylenedimethylhydrazo and methyleneoxymethylimino.

[0319] Scaffolds that can mimic nucleic acids can also be constructed wherein the phosphate linker and ribose sugar are replaced by nuclease resistant nucleoside or nucleotide surrogates. Such modifications may comprise backbone and sugar modifications. In some embodiments, the nucleobases can be tethered by a surrogate backbone. Examples can include, without limitation, the morpholino, cyclobutyl, pyrrolidine and peptide nucleic acid (PNA) nucleoside surrogates.

[0320] The modified nucleosides and modified nucleotides can include one or more modifications to the sugar group, i.e. at sugar modification. For example, the 2′ hydroxyl group (OH) can be modified, e.g. replaced with a number of different “oxy” or “deoxy” substituents. In some embodiments, modifications to the 2′ hydroxyl group can enhance the stability of the nucleic acid since the hydroxyl can no longer be deprotonated to form a 2′-alkoxide ion.

[0321] Examples of 2′ hydroxyl group modifications can include alkoxy or aryloxy (OR, wherein “R” can be, e.g., alkyl, cycloalkyl, aryl, aralkyl, heteroaryl or a sugar); polyethyleneglycols (PEG), O(CH₂CH₂O)ₙCH₂CH₂OR wherein R can be, e.g., H or optionally substituted alkyl, and n can be an integer from 0 to 20 (e.g., from 0 to 4, from 0 to 8, from 0 to 10, from 0 to 16, from 1 to 4, from 1 to 8, from 1 to 10, from 1 to 16, from 1 to 20, from 2 to 4, from 2 to 8, from 2 to 10, from 2 to 16, from 2 to 20, from 4 to 8, from 4 to 10, from 4 to 16, and from 4 to 20). In some embodiments, the 2′ hydroxyl group modification can be 2′-O-Me. In some embodiments, the 2′ hydroxyl group modification can be a 2′-fluoro modification, which replaces the 2′ hydroxyl group with a fluoride. In some embodiments, the 2′ hydroxyl group modification can include “locked” nucleic acids (LNA) in which the 2′ hydroxyl can be connected, e.g., by a C₁₋₆ alkylene or C₁₋₆ heteroalkylene bridge, to the 4′ carbon of the same ribose sugar, where exemplary bridges can include methylene, propylene, ether, or amino bridges; O-amino (wherein amino can be, e.g., NH₂; alkylamino, dialkylamino, heterocyclyl, arylamino, diarylamino, heteroarylamino, or diheteroarylamino, ethylenediamine, or polyamino) and aminoalkoxy, O(CH₂)ₙ-amino, (wherein amino can be, e.g., NH₂; alkylamino, dialkylamino, heterocyclyl, arylamino, diarylamino, heteroarylamino, or diheteroarylamino, ethylenediamine, or polyamino). In some embodiments, the 2′ hydroxyl group modification can include “unlocked” nucleic acids (UNA) in which the ribose ring lacks the C2′-C3′ bond. In some embodiments, the 2′ hydroxyl group modification can include the methoxyethyl group (MOE), (OCH₂CH₂OCH₃, e.g., a PEG derivative).

[0322] “Deoxy” 2′ modifications can include hydrogen (i.e. deoxyribose sugars, e.g., at the overhang portions of partially dsRNA); halo (e.g., bromo, chloro, fluoro, or iodo); amino (wherein amino can be, e.g., NH₂; alkylamino, dialkylamino, heterocyclyl, arylamino, diarylamino, heteroarylamino, diheteroarylamino, or amino acid); NH(CH₂CH₂NH)ₙCH2CH₂— amino (wherein amino can be, e.g., as described herein), —NHC(O)R (wherein R can be, e.g., alkyl, cycloalkyl, aryl, aralkyl, heteroaryl or sugar), cyano; mercapto; alkyl-thio-alkyl; thioalkoxy; and alkyl, cycloalkyl, aryl, alkenyl and alkynyl, which may be optionally substituted with e.g., an amino as described herein.

[0323] The sugar modification can comprise a sugar group which may also contain one or more carbons that possess the opposite stereochemical configuration than that of the corresponding carbon in ribose. Thus, a modified nucleic acid can include nucleotides containing e.g., arabinose, as the sugar. The modified nucleic acids can also include abasic sugars. These abasic sugars can also be further modified at one or more of the constituent sugar atoms. The modified nucleic acids can also include one or more sugars that are in the L form, e.g. L-nucleosides.

[0324] The modified nucleosides and modified nucleotides described herein, which can be incorporated into a modified nucleic acid, can include a modified base, also called a nucleobase. Examples of nucleobases include, but are not limited to, adenine (A), guanine (G), cytosine (C), and uracil (U). These nucleobases can be modified or wholly replaced to provide modified residues that can be incorporated into modified nucleic acids. The nucleobase of the nucleotide can be independently selected from a purine, a pyrimidine, a purine analog, or pyrimidine analog. In some embodiments, the nucleobase can include, for example, naturally-occurring and synthetic derivatives of a base.

[0325] In embodiments employing a dual guide RNA, each of the crRNA and the tracr RNA can contain modifications. Such modifications may be at one or both ends of the crRNA and/or tracr RNA. In embodiments comprising sgRNA, one or more residues at one or both ends of the sgRNA may be chemically modified, and/or internal nucleosides may be modified, and/or the entire sgRNA may be chemically modified. Certain embodiments comprise a 5′ end modification. Certain embodiments comprise a 3′ end modification.

[0326] Modifications of 2′-O-methyl are encompassed.

[0327] Another chemical modification that has been shown to influence nucleotide sugar rings is halogen substitution. For example, 2′-fluoro (2′-F) substitution on nucleotide sugar rings can increase oligonucleotide binding affinity and nuclease stability. Modifications of 2′-fluoro (2′-F) are encompassed.

[0328] Phosphorothioate (PS) linkage or bond refers to a bond where a sulfur is substituted for one nonbridging phosphate oxygen in a phosphodiester linkage, for example in the bonds between nucleotides bases. When phosphorothioates are used to generate oligonucleotides, the modified oligonucleotides may also be referred to as S-oligos.

[0329] Abasic nucleotides refer to those which lack nitrogenous bases.

[0330] Inverted bases refer to those with linkages that are inverted from the normal 5′ to 3′ linkage (i.e., either a 5′ to 5′ linkage or a 3′ to 3′ linkage).

[0331] An abasic nucleotide can be attached with an inverted linkage. For example, an abasic nucleotide may be attached to the terminal 5′ nucleotide via a 5′ to 5′ linkage, or an abasic nucleotide may be attached to the terminal 3′ nucleotide via a 3′ to 3′ linkage. An inverted abasic nucleotide at either the terminal 5′ or 3′ nucleotide may also be called an inverted abasic end cap.

[0332] In some embodiments, one or more of the first three, four, or five nucleotides at the 5′ terminus, and one or more of the last three, four, or five nucleotides at the 3′ terminus are modified. In some embodiments, the modification is a 2′-O-Me, 2′-F, inverted abasic nucleotide, PS bond, or other nucleotide modification well known in the art to increase stability and/or performance.

[0333] In some embodiments, the first four nucleotides at the 5′ terminus, and the last four nucleotides at the 3′ terminus are linked with phosphorothioate (PS) bonds.

[0334] In some embodiments, the first three nucleotides at the 5′ terminus, and the last three nucleotides at the 3′ terminus comprise a 2′-O-methyl (2′-O-Me) modified nucleotide. In some embodiments, the first three nucleotides at the 5′ terminus, and the last three nucleotides at the 3′ terminus comprise a 2′-fluoro (2′-F) modified nucleotide.

### Ribonucleoprotein Complex

[0335] In some embodiments, a composition is encompassed comprising: a) one or more guide RNAs comprising one or more guide sequences from Table 6 and b) SaCas9 (when combined with a gRNA comprising any one of or combination of SEQ ID Nos: 1-159) or SluCas9 (when combined with a gRNA comprising any one of or combination of SEQ ID Nos: 200-292, 924-938, or 950-955), or any of the mutant Cas9 proteins disclosed herein. In some embodiments, the guide RNA together with a Cas9 is called a ribonucleoprotein complex (RNP).

[0336] In some embodiments, the disclosure provides for an RNP complex, wherein the guide RNA (e.g., any of the guide RNAs disclosed herein) binds to or is capable of binding to a target sequence in the dystrophin gene.

[0337] In some embodiments, chimeric Cas9 (SaCas9 or SluCas9) nucleases are used, where one domain or region of the protein is replaced by a portion of a different protein. In some embodiments, a Cas9 nuclease domain may be replaced with a domain from a different nuclease such as Fok1. In some embodiments, a Cas9 nuclease may be a modified nuclease.

[0338] In some embodiments, the Cas9 is modified to contain only one functional nuclease domain. For example, the agent protein may be modified such that one of the nuclease domains is mutated or fully or partially deleted to reduce its nucleic acid cleavage activity.

[0339] In some embodiments, a conserved amino acid within a Cas9 protein nuclease domain is substituted to reduce or alter nuclease activity. In some embodiments, a Cas9 nuclease may comprise an amino acid substitution in the RuvC or RuvC-like nuclease domain. Exemplary amino acid substitutions in the RuvC or RuvC-like nuclease domain include D10A (based on the S. pyogenes Cas9 protein). See, e.g., Zetsche et al. (2015) Cell October 22:163(3): 759-771. In some embodiments, the Cas9 nuclease may comprise an amino acid substitution in the HNH or HNH-like nuclease domain. Exemplary amino acid substitutions in the HNH or HNH-like nuclease domain include E762A, H840A, N863A, H983A, and D986A (based on the S. pyogenes Cas9 protein). See, e.g., Zetsche et al. (2015). Further exemplary amino acid substitutions include D917A, E1006A, and D1255A (based on the Francisella novicida U112 Cpf1 (FnCpf1) sequence (UniProtKB-AOQ7Q2 (CPF1_FRATN)). Further exemplary amino acid substitutions include D10A and N580A (based on the S. aureus Cas9 protein). See, e.g., Friedland et al., 2015, Genome Biol., 16:257.

[0340] In some embodiments, the Cas9 lacks cleavase activity. In some embodiments, the Cas9 comprises a dCas DNA-binding polypeptide. A dCas polypeptide has DNA-binding activity while essentially lacking catalytic (cleavase/nickase) activity. In some embodiments, the dCas polypeptide is a dCas9 polypeptide. In some embodiments, the Cas9 lacking cleavase activity or the dCas DNA-binding polypeptide is a version of a Cas nuclease (e.g., a Cas9 nuclease discussed above) in which its endonucleolytic active sites are inactivated, e.g., by one or more alterations (e.g., point mutations) in its catalytic domains. See, e.g., US 2014/0186958 A1; US 2015/0166980 A1.

[0341] In some embodiments, the Cas9 comprises one or more heterologous functional domains (e.g., is or comprises a fusion polypeptide).

[0342] In some embodiments, the heterologous functional domain may facilitate transport of the Cas9 into the nucleus of a cell. For example, the heterologous functional domain may be a nuclear localization signal (NLS). In some embodiments, the Cas9 may be fused with 1-10 NLS(s). In some embodiments, the Cas9 may be fused with 1-5 NLS(s). In some embodiments, the Cas9 may be fused with 1-3 NLS(s). In some embodiments, the Cas9 may be fused with one NLS. Where one NLS is used, the NLS may be attached at the N-terminus or the C-terminus of the Cas9 sequence, and may be directly fused/attached. In some embodiments, where more than one NLS is used, one or more NLS may be attached at the N-terminus and/or one or more NLS may be attached at the C-terminus. In some embodiments, one or more NLSs are directly attached to the Cas9. In some embodiments, one or more NLSs are attached to the Cas9 by means of a linker. In some embodiments, the linker is between 3-25 amino acids in length. In some embodiments, the linker is between 3-6 amino acids in length. In some embodiments, the linker comprises glycine and serine. In some embodiments, the linker comprises the sequence of GSVD (SEQ ID NO: 550) or GSGS (SEQ ID NO: 551). It may also be inserted within the Cas9 sequence. In other embodiments, the Cas9 may be fused with more than one NLS. In some embodiments, the Cas9 may be fused with 2, 3, 4, or 5 NLSs. In some embodiments, the Cas9 may be fused with two NLSs. In certain circumstances, the two NLSs may be the same (e.g., two SV40 NLSs) or different. In some embodiments, the Cas9 protein is fused with one or more SV40 NLSs. In some embodiments, the SV40 NLS comprises the amino acid sequence of SEQ ID NO: 713 (PKKKRKV). In some embodiments, the Cas9 protein (e.g., the SaCas9 or SluCas9 protein) is fused to one or more nucleoplasmin NLSs. In some embodiments, the Cas protein is fused to one or more c-myc NLSs. In some embodiments, the Cas protein is fused to one or more E1A NLSs. In some embodiments, the Cas protein is fused to one or more BP (bipartite) NLSs. In some embodiments, the nucleoplasmin NLS comprises the amino acid sequence of SEQ ID NO: 714 (KRPAATKKAGQAKKKK). In some embodiments, the Cas9 protein is fused with a c-Myc NLS. In some embodiments, the c-Myc NLS comprises the amino acid sequence of SEQ ID NO: 942 (PAAKKKKLD) and/or is encoded by the nucleic acid sequence of SEQ ID NO: 722 (CCGGCAGCTAAGAAAAAGAAACTGGAT). In some embodiments, the Cas9 is fused to two SV40 NLS sequences linked at the carboxy terminus. In some embodiments, the Cas9 may be fused with two NLSs, one linked at the N-terminus and one at the C-terminus. In some embodiments, the Cas9 may be fused with 3 NLSs. In some embodiments, the Cas9 may be fused with 3 NLSs, two linked at the N-terminus and one linked at the C-terminus. In some embodiments, the Cas9 may be fused with 3 NLSs, one linked at the N-terminus and two linked at the C-terminus. In some embodiments, the Cas9 may be fused with no NLS. In some embodiments, the Cas9 may be fused with one NLS. In some embodiments, the Cas9 may be fused with an NLS on the C-terminus and does not comprise an NLS fused on the N-terminus. In some embodiments, the Cas9 may be fused with an NLS on the N-terminus and does not comprise an NLS fused on the C-terminus. In some embodiments, the Cas9 protein is fused to an SV40 NLS and to a nucleoplasmin NLS. In some embodiments, the Cas9 protein is fused to an SV40 NLS and to a c-Myc NLS. In some embodiments, the SV40 NLS is fused to the C-terminus of the Cas9, while the nucleoplasmin NLS is fused to the N-terminus of the Cas9 protein. In some embodiments, the SV40 NLS is fused to the C-terminus of the Cas9, while the c-Myc NLS is fused to the N-terminus of the Cas9 protein. In some embodiments, the SV40 NLS is fused to the N-terminus of the Cas9, while the nucleoplasmin NLS is fused to the C-terminus of the Cas9 protein. In some embodiments, the SV40 NLS is fused to the N-terminus of the Cas9, while the c-Myc NLS is fused to the C-terminus of the Cas9 protein. In some embodiments, the SV40 NLS is fused to the Cas9 protein by means of a linker. In some embodiments, the SV40 NLS and linker is encoded by the nucleic acid sequence of SEQ ID NO: 723 (ATGATGGCCCCAAAGAAGAAGCGGAAGGTCGGTATCCACGGAGTCCCAGCAGCC). In some embodiments, the nucleoplasmin NLS is fused to the Cas9 protein by means of a linker. In some embodiments, the c-Myc NLS is fused to the Cas9 protein by means of a linker. In some embodiments, an additional domain may be: a) fused to the N- or C-terminus of the Cas protein (e.g., a Cas9 protein), b) fused to the N-terminus of an NLS fused to the N-terminus of a Cas protein, or c) fused to the C-terminus of an NLS fused to the C-terminus of a Cas protein. In some embodiments, an NLS is fused to the N- and/or C-terminus of the Cas protein by means of a linker. In some embodiments, an NLS is fused to the N-terminus of an N-terminally-fused NLS on a Cas protein by means of a linker, and/or an NLS is fused to the C-terminus of a C-terminally fused NLS on a Cas protein by means of a linker. In some embodiments, the linker is GSVD (SEQ ID NO: 550) or GSGS (SEQ ID NO: 551). In some embodiments, the Cas protein comprises a c-Myc NLS fused to the N-terminus of the Cas protein (or to an N-terminally-fused NLS on the Cas protein), optionally by means of a linker. In some embodiments, the Cas protein comprises an SV40 NLS fused to the C-terminus of the Cas protein (or to a C-terminally-fused NLS on the Cas protein), optionally by means of a linker. In some embodiments, the Cas protein comprises a nucleoplasmin NLS fused to the C-terminus of the Cas protein (or to a C-terminally-fused NLS on the Cas protein), optionally by means of a linker. In some embodiments, the Cas protein comprises: a) a c-Myc NLS fused to the N-terminus of the Cas protein, optionally by means of a linker, b) an SV40 NLS fused to the C-terminus of the Cas protein, optionally by means of a linker, and c) a nucleoplasmin NLS fused to the C-terminus of the SV40 NLS, optionally by means of a linker. In some embodiments, the Cas protein comprises: a) a c-Myc NLS fused to the N-terminus of the Cas protein, optionally by means of a linker, b) a nucleoplasmin NLS fused to the C-terminus of the Cas protein, optionally by means of a linker, and c) an SV40 NLS fused to the C-terminus of the nucleoplasmin NLS, optionally by means of a linker. In some embodiments, a c-myc NLS is fused to the N-terminus of the Cas9 and an SV40 NLS and/or nucleoplasmin NLS is fused to the C-terminus of the Cas9. In some embodiments, a c-myc NLS is fused to the N-terminus of the Cas9 (e.g., by means of a linker such as GSVD), an SV40 NLS is fused to the C-terminus of the Cas9 (e.g., by means of a linker such as GSGS), and a nucleoplasmin NLS is fused to the C-terminus of the SV-40 NLS (e.g., by means of a linker such as GSGS).

[0343] In some embodiments, the heterologous functional domain may be capable of modifying the intracellular half-life of the Cas9. In some embodiments, the half-life of the Cas9 may be increased. In some embodiments, the half-life of the Cas9 may be reduced. In some embodiments, the heterologous functional domain may be capable of increasing the stability of the Cas9. In some embodiments, the heterologous functional domain may be capable of reducing the stability of the Cas9. In some embodiments, the heterologous functional domain may act as a signal peptide for protein degradation. In some embodiments, the protein degradation may be mediated by proteolytic enzymes, such as, for example, proteasomes, lysosomal proteases, or calpain proteases. In some embodiments, the heterologous functional domain may comprise a PEST sequence. In some embodiments, the Cas9 may be modified by addition of ubiquitin or a polyubiquitin chain. In some embodiments, the ubiquitin may be a ubiquitin-like protein (UBL). Non-limiting examples of ubiquitin-like proteins include small ubiquitin-like modifier (SUMO), ubiquitin cross-reactive protein (UCRP, also known as interferon-stimulated gene-15 (ISG15)), ubiquitin-related modifier-1 (URM1), neuronal-precursor-cell-expressed developmentally downregulated protein-8 (NEDD8, also called Rub1 in S. cerevisiae), human leukocyte antigen F-associated (FAT10), autophagy-8 (ATG8) and −12 (ATG12), Fau ubiquitin-like protein (FUB1), membrane-anchored UBL (MUB), ubiquitin fold-modifier-I (UFM1), and ubiquitin-like protein-5 (UBL5).

[0344] In some embodiments, the heterologous functional domain may be a marker domain. Non-limiting examples of marker domains include fluorescent proteins, purification tags, epitope tags, and reporter gene sequences. In some embodiments, the marker domain may be a fluorescent protein. Non-limiting examples of suitable fluorescent proteins include green fluorescent proteins (e.g., GFP, GFP-2, tagGFP, turboGFP, sfGFP, EGFP, Emerald, Azami Green, Monomeric Azami Green, CopGFP, AceGFP, ZsGreenl), yellow fluorescent proteins (e.g., YFP, EYFP, Citrine, Venus, YPet, PhiYFP, ZsYellowl), blue fluorescent proteins (e.g., EBFP, EBFP2, Azurite, mKalamal, GFPuv, Sapphire, T-sapphire,), cyan fluorescent proteins (e.g., ECFP, Cerulean, CyPet, AmCyanl, Midoriishi-Cyan), red fluorescent proteins (e.g., mKate, mKate2, mPlum, DsRed monomer, mCherry, mRFP1, DsRed-Express, DsRed2, DsRed-Monomer, HcRed-Tandem, HcRedl, AsRed2, eqFP611, mRasberry, mStrawberry, Jred), and orange fluorescent proteins (mOrange, mKO, Kusabira-Orange, Monomeric Kusabira-Orange, mTangerine, tdTomato) or any other suitable fluorescent protein. In other embodiments, the marker domain may be a purification tag and/or an epitope tag. Non-limiting exemplary tags include glutathione-S-transferase (GST), chitin binding protein (CBP), maltose binding protein (MBP), thioredoxin (TRX), poly(NANP), tandem affinity purification (TAP) tag, myc, AcV5, AU1, AUS, E, ECS, E2, FLAG, HA, nus, Softag 1, Softag 3, Strep, SBP, Glu-Glu, HSV, KT3, S, S1, T7, V5, VSV-G, 6×His, 8×His, biotin carboxyl carrier protein (BCCP), poly-His, and calmodulin. Non-limiting exemplary reporter genes include glutathione-S-transferase (GST), horseradish peroxidase (HRP), chloramphenicol acetyltransferase (CAT), beta-galactosidase, beta-glucuronidase, luciferase, or fluorescent proteins.

[0345] In additional embodiments, the heterologous functional domain may target the Cas9 to a specific organelle, cell type, tissue, or organ. In some embodiments, the heterologous functional domain may target the Cas9 to muscle.

[0346] In further embodiments, the heterologous functional domain may be an effector domain. When the Cas9 is directed to its target sequence, e.g., when a Cas9 is directed to a target sequence by a guide RNA, the effector domain may modify or affect the target sequence. In some embodiments, the effector domain may be chosen from a nucleic acid binding domain or a nuclease domain (e.g., a non-Cas nuclease domain). In some embodiments, the heterologous functional domain is a nuclease, such as a FokI nuclease. See, e.g., U.S. Pat. No. 9,023,649.

[0347] In some embodiments, any of the compositions disclosed herein comprising any of the guides and/or endonucleases disclosed herein is sterile and/or substantially pyrogen-free. In particular embodiments, any of the compositions disclosed herein comprise a pharmaceutically acceptable carrier. The phrase “pharmaceutically or pharmacologically acceptable” refers to molecular entities and compositions that do not produce an adverse, allergic, or other untoward reaction when administered to an animal or human. As used herein “pharmaceutically acceptable carrier” includes any and all solvents (e.g., water), dispersion media, coatings, antibacterial and antifungal agents, isotonic and absorption delaying agents, and the like that are physiologically compatible, including pharmaceutically acceptable cell culture media. Pharmaceutically acceptable carriers include sterile aqueous solutions or dispersions and sterile powders for the extemporaneous preparation of sterile injectable solutions or dispersion. In some embodiments, the composition comprises a preservative to prevent the growth of microorganisms.

### Determination of Efficacy of Guide RNAs

[0348] In some embodiments, the efficacy of a guide RNA is determined when delivered or expressed together with other components forming an RNP. In some embodiments, the guide RNA is expressed together with a SaCas9 or SluCas9. In some embodiments, the guide RNA is delivered to or expressed in a cell line that already stably expresses an SaCas9 or SluCas9. In some embodiments the guide RNA is delivered to a cell as part of an RNP. In some embodiments, the guide RNA is delivered to a cell along with a nucleic acid (e.g., mRNA) encoding SaCas9 or SluCas9.

[0349] In some embodiments, the efficacy of particular guide RNAs is determined based on in vitro models. In some embodiments, the in vitro model is a cell line.

[0350] In some embodiments, the efficacy of particular guide RNAs is determined across multiple in vitro cell models for a guide RNA selection process. In some embodiments, a cell line comparison of data with selected guide RNAs is performed. In some embodiments, cross screening in multiple cell models is performed.

[0351] In some embodiments, the efficacy of particular guide RNAs is determined based on in vivo models. In some embodiments, the in vivo model is a rodent model. In some embodiments, the rodent model is a mouse which expresses a mutated dystrophin gene. In some embodiments, the in vivo model is a non-human primate, for example cynomolgus monkey.

### III. Methods of Gene Editing and Treating DMD

[0352] This disclosure provides methods for gene editing and treating Duchenne Muscular Dystrophy (DMD). In some embodiments, any of the compositions described herein may be administered to a subject in need thereof for use in making a double or single strand break, or excising a portion (e.g., less than about 250 nucleotides) in any one or more of exons 44, 45, 50, 51, or 53 of the dystrophin (DMD) gene and to treat DMD. In some embodiments, pairs of guide RNAs described herein, in any of the vector configurations described herein, may be administered to a subject in need thereof to make a single or double-strand break, excise a portion of a DMD, and treat DMD. In some embodiments, any of the compositions described herein may be administered to a subject in need thereof for use in treating DMD exon. In some embodiments, a nucleic acid molecule comprising a first nucleic acid encoding one or more guide RNAs of Table 6 and a second nucleic acid encoding either SaCas9 or SluCas9 (depending on the guide) is administered to a subject to treat DMD. In some embodiments, a single nucleic acid molecule (which may be a vector, including an AAV vector) comprising a first nucleic acid encoding one or more guide RNAs of Table 6 and a second nucleic acid encoding either SaCas9 or SluCas9 (depending on the guide) is administered to a subject to treat DMD. In some embodiments, more than one nucleic acid molecules (which may be a vectors, including an AAV vectors) are administered to a subject to treat DMD, wherein a first nucleic acid encoding one or more guide RNAs of Table 6 and a second nucleic acid encoding either SaCas9 or SluCas9 (depending on the guide) are together on one nucleic acid molecule or separated on different nucleic acid molecules.

[0353] In some embodiments, any of the compositions described herein is administered to a subject in need thereof to treat Duchenne Muscular Dystrophy (DMD).

[0354] In some embodiments, any of the compositions described herein is administered to a subject in need thereof to induce a double or single strand break in any one or more of exons 44, 45, 50, 51, or 53 of the dystrophin gene.

[0355] In some embodiments, any of the compositions described herein is administered to a subject in need thereof to delete a portion (e.g., excise a portion) any one of exons 44, 45, 50, 51, or 53 of the dystrophin gene.

[0356] In some embodiments, a method of treating Duchenne Muscular Dystrophy (DMD) is provided, the method comprising delivering to a cell any one of the compositions described herein, wherein the cell comprises a mutation in the dystrophin gene that is known to be associated with DMD.

[0357] In some embodiments, methods are provided for treating Duchenne Muscular Dystrophy (DMD), the method comprising delivering to a cell at least one nucleic acid molecule comprising a pair of guide RNAs comprising a first and second spacer sequence, wherein the pair of first and spacer sequences are selected from any one of the following pairs: SEQ ID NO: 1 and SEQ ID NO: 3; SEQ ID NO: 3 and SEQ ID NO: 4; SEQ ID NO: 3 and SEQ ID NO: 5; SEQ ID NO: 3 and SEQ ID NO: 6; SEQ ID NO: 3 and SEQ ID NO: 7; SEQ ID NO: 3 and SEQ ID NO: 8; SEQ ID NO: 3 and SEQ ID NO: 9; SEQ ID NO: 4 and SEQ ID NO: 5; SEQ ID NO: 4 and SEQ ID NO: 6; SEQ ID NO: 4 and SEQ ID NO: 7; SEQ ID NO: 4 and SEQ ID NO: 8; SEQ ID NO: 4 and SEQ ID NO: 9; SEQ ID NO: 5 and SEQ ID NO: 6; SEQ ID NO: 5 and SEQ ID NO: 7; SEQ ID NO: 5 and SEQ ID NO: 8; SEQ ID NO: 5 and SEQ ID NO: 9; SEQ ID NO: 6 and SEQ ID NO: 7; SEQ ID NO: 6 and SEQ ID NO: 8; SEQ ID NO: 6 and SEQ ID NO: 9; SEQ ID NO: 7 and SEQ ID NO: 8; SEQ ID NO: 7 and SEQ ID NO: 9; SEQ ID NO: 8 and SEQ ID NO: 9; SEQ ID NO: 11 and SEQ ID NO: 12; SEQ ID NO: 11 and SEQ ID NO: 13; SEQ ID NO: 11 and SEQ ID NO: 14; SEQ ID NO: 11 and SEQ ID NO: 15; SEQ ID NO: 12 and SEQ ID NO: 13; SEQ ID NO: 12 and SEQ ID NO: 14; SEQ ID NO: 12 and SEQ ID NO: 15; SEQ ID NO: 13 and SEQ ID NO: 14; SEQ ID NO: 13 and SEQ ID NO: 15; SEQ ID NO: 14 and SEQ ID NO: 15; SEQ ID NO: 16 and SEQ ID NO: 17; SEQ ID NO: 16 and SEQ ID NO: 18; SEQ ID NO: 16 and SEQ ID NO: 19; SEQ ID NO: 16 and SEQ ID NO: 20; SEQ ID NO: 16 and SEQ ID NO: 21; SEQ ID NO: 16 and SEQ ID NO: 22; SEQ ID NO: 16 and SEQ ID NO: 23; SEQ ID NO: 16 and SEQ ID NO: 24; SEQ ID NO: 16 and SEQ ID NO: 25; SEQ ID NO: 16 and SEQ ID NO: 26; SEQ ID NO: 17 and SEQ ID NO: 18; SEQ ID NO: 17 and SEQ ID NO: 19; SEQ ID NO: 17 and SEQ ID NO: 20; SEQ ID NO: 17 and SEQ ID NO: 21; SEQ ID NO: 17 and SEQ ID NO: 22; SEQ ID NO: 17 and SEQ ID NO: 23; SEQ ID NO: 17 and SEQ ID NO: 24; SEQ ID NO: 17 and SEQ ID NO: 25; SEQ ID NO: 17 and SEQ ID NO: 26; SEQ ID NO: 18 and SEQ ID NO: 19; SEQ ID NO: 18 and SEQ ID NO: 20; SEQ ID NO: 18 and SEQ ID NO: 21; SEQ ID NO: 18 and SEQ ID NO: 22; SEQ ID NO: 18 and SEQ ID NO: 23; SEQ ID NO: 18 and SEQ ID NO: 24; SEQ ID NO: 18 and SEQ ID NO: 25; SEQ ID NO: 18 and SEQ ID NO: 26; SEQ ID NO: 19 and SEQ ID NO: 20; SEQ ID NO: 19 and SEQ ID NO: 21; SEQ ID NO: 19 and SEQ ID NO: 22; SEQ ID NO: 19 and SEQ ID NO: 23; SEQ ID NO: 19 and SEQ ID NO: 24; SEQ ID NO: 19 and SEQ ID NO: 25; SEQ ID NO: 19 and SEQ ID NO: 26; SEQ ID NO: 20 and SEQ ID NO: 21; SEQ ID NO: 20 and SEQ ID NO: 22; SEQ ID NO: 20 and SEQ ID NO: 23; SEQ ID NO: 20 and SEQ ID NO: 24; SEQ ID NO: 20 and SEQ ID NO: 25; SEQ ID NO: 20 and SEQ ID NO: 26; SEQ ID NO: 21 and SEQ ID NO: 22; SEQ ID NO: 21 and SEQ ID NO: 23; SEQ ID NO: 21 and SEQ ID NO: 24; SEQ ID NO: 21 and SEQ ID NO: 25; SEQ ID NO: 21 and SEQ ID NO: 26; SEQ ID NO: 22 and SEQ ID NO: 23; SEQ ID NO: 22 and SEQ ID NO: 24; SEQ ID NO: 22 and SEQ ID NO: 25; SEQ ID NO: 22 and SEQ ID NO: 26; SEQ ID NO: 23 and SEQ ID NO: 24; SEQ ID NO: 23 and SEQ ID NO: 25; SEQ ID NO: 23 and SEQ ID NO: 26; SEQ ID NO: 24 and SEQ ID NO: 25; SEQ ID NO: 24 and SEQ ID NO: 26; SEQ ID NO: 25 and SEQ ID NO: 26; SEQ ID NO: 110 and SEQ ID NO: 120; SEQ ID NO: 110 and SEQ ID NO: 121; SEQ ID NO: 110 and SEQ ID NO: 122; SEQ ID NO: 110 and SEQ ID NO: 123; SEQ ID NO: 110 and SEQ ID NO: 124; SEQ ID NO: 110 and SEQ ID NO: 125; SEQ ID NO: 111 and SEQ ID NO: 112; SEQ ID NO: 111 and SEQ ID NO: 113; SEQ ID NO: 111 and SEQ ID NO: 114; SEQ ID NO: 111 and SEQ ID NO: 115; SEQ ID NO: 111 and SEQ ID NO: 116; SEQ ID NO: 111 and SEQ ID NO: 117; SEQ ID NO: 111 and SEQ ID NO: 118; SEQ ID NO: 111 and SEQ ID NO: 119; SEQ ID NO: 111 and SEQ ID NO: 120; SEQ ID NO: 111 and SEQ ID NO: 121; SEQ ID NO: 111 and SEQ ID NO: 122; SEQ ID NO: 111 and SEQ ID NO: 123; SEQ ID NO: 111 and SEQ ID NO: 124; SEQ ID NO: 111 and SEQ ID NO: 125; SEQ ID NO: 112 and SEQ ID NO: 113; SEQ ID NO: 112 and SEQ ID NO: 114; SEQ ID NO: 112 and SEQ ID NO: 115; SEQ ID NO: 112 and SEQ ID NO: 116; SEQ ID NO: 112 and SEQ ID NO: 117; SEQ ID NO: 112 and SEQ ID NO: 118; SEQ ID NO: 112 and SEQ ID NO: 119; SEQ ID NO: 112 and SEQ ID NO: 120; SEQ ID NO: 112 and SEQ ID NO: 121; SEQ ID NO: 112 and SEQ ID NO: 122; SEQ ID NO: 112 and SEQ ID NO: 123; SEQ ID NO: 112 and SEQ ID NO: 124; SEQ ID NO: 112 and SEQ ID NO: 125; SEQ ID NO: 113 and SEQ ID NO: 114; SEQ ID NO: 113 and SEQ ID NO: 115; SEQ ID NO: 113 and SEQ ID NO: 116; SEQ ID NO: 113 and SEQ ID NO: 117; SEQ ID NO: 113 and SEQ ID NO: 118; SEQ ID NO: 113 and SEQ ID NO: 119; SEQ ID NO: 113 and SEQ ID NO: 120; SEQ ID NO: 113 and SEQ ID NO: 121; SEQ ID NO: 113 and SEQ ID NO: 122; SEQ ID NO: 113 and SEQ ID NO: 123; SEQ ID NO: 113 and SEQ ID NO: 124; SEQ ID NO: 113 and SEQ ID NO: 125; SEQ ID NO: 114 and SEQ ID NO: 115; SEQ ID NO: 114 and SEQ ID NO: 116; SEQ ID NO: 114 and SEQ ID NO: 117; SEQ ID NO: 114 and SEQ ID NO: 118; SEQ ID NO: 114 and SEQ ID NO: 119; SEQ ID NO: 114 and SEQ ID NO: 120; SEQ ID NO: 114 and SEQ ID NO: 121; SEQ ID NO: 114 and SEQ ID NO: 122; SEQ ID NO: 114 and SEQ ID NO: 123; SEQ ID NO: 114 and SEQ ID NO: 124; SEQ ID NO: 114 and SEQ ID NO: 125; SEQ ID NO: 115 and SEQ ID NO: 116; SEQ ID NO: 115 and SEQ ID NO: 117; SEQ ID NO: 115 and SEQ ID NO: 118; SEQ ID NO: 115 and SEQ ID NO: 119; SEQ ID NO: 115 and SEQ ID NO: 120; SEQ ID NO: 115 and SEQ ID NO: 121; SEQ ID NO: 115 and SEQ ID NO: 122; SEQ ID NO: 115 and SEQ ID NO: 123; SEQ ID NO: 115 and SEQ ID NO: 124; SEQ ID NO: 115 and SEQ ID NO: 125; SEQ ID NO: 116 and SEQ ID NO: 117; SEQ ID NO: 116 and SEQ ID NO: 118; SEQ ID NO: 116 and SEQ ID NO: 119; SEQ ID NO: 116 and SEQ ID NO: 120; SEQ ID NO: 116 and SEQ ID NO: 121; SEQ ID NO: 116 and SEQ ID NO: 122; SEQ ID NO: 116 and SEQ ID NO: 123; SEQ ID NO: 116 and SEQ ID NO: 124; SEQ ID NO: 116 and SEQ ID NO: 125; SEQ ID NO: 117 and SEQ ID NO: 118; SEQ ID NO: 117 and SEQ ID NO: 119; SEQ ID NO: 117 and SEQ ID NO: 120; SEQ ID NO: 117 and SEQ ID NO: 121; SEQ ID NO: 117 and SEQ ID NO: 122; SEQ ID NO: 117 and SEQ ID NO: 123; SEQ ID NO: 117 and SEQ ID NO: 124; SEQ ID NO: 117 and SEQ ID NO: 125; SEQ ID NO: 118 and SEQ ID NO: 119; SEQ ID NO: 118 and SEQ ID NO: 120; SEQ ID NO: 118 and SEQ ID NO: 121; SEQ ID NO: 118 and SEQ ID NO: 122; SEQ ID NO: 118 and SEQ ID NO: 123; SEQ ID NO: 118 and SEQ ID NO: 124; SEQ ID NO: 118 and SEQ ID NO: 125; SEQ ID NO: 119 and SEQ ID NO: 120; SEQ ID NO: 119 and SEQ ID NO: 121; SEQ ID NO: 119 and SEQ ID NO: 122; SEQ ID NO: 119 and SEQ ID NO: 123; SEQ ID NO: 119 and SEQ ID NO: 124; SEQ ID NO: 119 and SEQ ID NO: 125; SEQ ID NO: 120 and SEQ ID NO: 121; SEQ ID NO: 120 and SEQ ID NO: 122; SEQ ID NO: 120 and SEQ ID NO: 123; SEQ ID NO: 120 and SEQ ID NO: 124; SEQ ID NO: 120 and SEQ ID NO: 125; SEQ ID NO: 121 and SEQ ID NO: 122; SEQ ID NO: 121 and SEQ ID NO: 123; SEQ ID NO: 121 and SEQ ID NO: 124; SEQ ID NO: 121 and SEQ ID NO: 125; SEQ ID NO: 122 and SEQ ID NO: 123; SEQ ID NO: 122 and SEQ ID NO: 124; SEQ ID NO: 122 and SEQ ID NO: 125; SEQ ID NO: 123 and SEQ ID NO: 124; SEQ ID NO: 123 and SEQ ID NO: 125; SEQ ID NO: 124 and SEQ ID NO: 125; SEQ ID NO: 126 and SEQ ID NO: 127; SEQ ID NO: 126 and SEQ ID NO: 128; SEQ ID NO: 126 and SEQ ID NO: 129; SEQ ID NO: 126 and SEQ ID NO: 130; SEQ ID NO: 126 and SEQ ID NO: 131; SEQ ID NO: 126 and SEQ ID NO: 132; SEQ ID NO: 126 and SEQ ID NO: 133; SEQ ID NO: 126 and SEQ ID NO: 134; SEQ ID NO: 126 and SEQ ID NO: 135; SEQ ID NO: 126 and SEQ ID NO: 136; SEQ ID NO: 126 and SEQ ID NO: 137; SEQ ID NO: 126 and SEQ ID NO: 138; SEQ ID NO: 126 and SEQ ID NO: 139; SEQ ID NO: 126 and SEQ ID NO: 140; SEQ ID NO: 126 and SEQ ID NO: 141; SEQ ID NO: 126 and SEQ ID NO: 142; SEQ ID NO: 126 and SEQ ID NO: 143; SEQ ID NO: 126 and SEQ ID NO: 144; SEQ ID NO: 126 and SEQ ID NO: 145; SEQ ID NO: 126 and SEQ ID NO: 146; SEQ ID NO: 126 and SEQ ID NO: 147; SEQ ID NO: 127 and SEQ ID NO: 128; SEQ ID NO: 127 and SEQ ID NO: 129; SEQ ID NO: 127 and SEQ ID NO: 130; SEQ ID NO: 127 and SEQ ID NO: 131; SEQ ID NO: 127 and SEQ ID NO: 132; SEQ ID NO: 127 and SEQ ID NO: 133; SEQ ID NO: 127 and SEQ ID NO: 134; SEQ ID NO: 127 and SEQ ID NO: 135; SEQ ID NO: 127 and SEQ ID NO: 136; SEQ ID NO: 127 and SEQ ID NO: 137; SEQ ID NO: 127 and SEQ ID NO: 138; SEQ ID NO: 127 and SEQ ID NO: 139; SEQ ID NO: 127 and SEQ ID NO: 140; SEQ ID NO: 127 and SEQ ID NO: 141; SEQ ID NO: 127 and SEQ ID NO: 142; SEQ ID NO: 127 and SEQ ID NO: 143; SEQ ID NO: 127 and SEQ ID NO: 144; SEQ ID NO: 127 and SEQ ID NO: 145; SEQ ID NO: 127 and SEQ ID NO: 146; SEQ ID NO: 127 and SEQ ID NO: 147; SEQ ID NO: 128 and SEQ ID NO: 129; SEQ ID NO: 128 and SEQ ID NO: 130; SEQ ID NO: 128 and SEQ ID NO: 131; SEQ ID NO: 128 and SEQ ID NO: 132; SEQ ID NO: 128 and SEQ ID NO: 133; SEQ ID NO: 128 and SEQ ID NO: 134; SEQ ID NO: 128 and SEQ ID NO: 135; SEQ ID NO: 128 and SEQ ID NO: 136; SEQ ID NO: 128 and SEQ ID NO: 137; SEQ ID NO: 128 and SEQ ID NO: 138; SEQ ID NO: 128 and SEQ ID NO: 139; SEQ ID NO: 128 and SEQ ID NO: 140; SEQ ID NO: 128 and SEQ ID NO: 141; SEQ ID NO: 128 and SEQ ID NO: 142; SEQ ID NO: 128 and SEQ ID NO: 143; SEQ ID NO: 128 and SEQ ID NO: 144; SEQ ID NO: 128 and SEQ ID NO: 145; SEQ ID NO: 128 and SEQ ID NO: 146; SEQ ID NO: 128 and SEQ ID NO: 147; SEQ ID NO: 129 and SEQ ID NO: 130; SEQ ID NO: 129 and SEQ ID NO: 131; SEQ ID NO: 129 and SEQ ID NO: 132; SEQ ID NO: 129 and SEQ ID NO: 133; SEQ ID NO: 129 and SEQ ID NO: 134; SEQ ID NO: 129 and SEQ ID NO: 135; SEQ ID NO: 129 and SEQ ID NO: 136; SEQ ID NO: 129 and SEQ ID NO: 137; SEQ ID NO: 129 and SEQ ID NO: 138; SEQ ID NO: 129 and SEQ ID NO: 139; SEQ ID NO: 129 and SEQ ID NO: 140; SEQ ID NO: 129 and SEQ ID NO: 141; SEQ ID NO: 129 and SEQ ID NO: 142; SEQ ID NO: 129 and SEQ ID NO: 143; SEQ ID NO: 129 and SEQ ID NO: 144; SEQ ID NO: 129 and SEQ ID NO: 145; SEQ ID NO: 129 and SEQ ID NO: 146; SEQ ID NO: 129 and SEQ ID NO: 147; SEQ ID NO: 130 and SEQ ID NO: 131; SEQ ID NO: 130 and SEQ ID NO: 132; SEQ ID NO: 130 and SEQ ID NO: 133; SEQ ID NO: 130 and SEQ ID NO: 134; SEQ ID NO: 130 and SEQ ID NO: 135; SEQ ID NO: 130 and SEQ ID NO: 136; SEQ ID NO: 130 and SEQ ID NO: 137; SEQ ID NO: 130 and SEQ ID NO: 138; SEQ ID NO: 130 and SEQ ID NO: 139; SEQ ID NO: 130 and SEQ ID NO: 140; SEQ ID NO: 130 and SEQ ID NO: 141; SEQ ID NO: 130 and SEQ ID NO: 142; SEQ ID NO: 130 and SEQ ID NO: 143; SEQ ID NO: 130 and SEQ ID NO: 144; SEQ ID NO: 130 and SEQ ID NO: 145; SEQ ID NO: 130 and SEQ ID NO: 146; SEQ ID NO: 130 and SEQ ID NO: 147; SEQ ID NO: 131 and SEQ ID NO: 132; SEQ ID NO: 131 and SEQ ID NO: 133; SEQ ID NO: 131 and SEQ ID NO: 134; SEQ ID NO: 131 and SEQ ID NO: 135; SEQ ID NO: 131 and SEQ ID NO: 136; SEQ ID NO: 131 and SEQ ID NO: 137; SEQ ID NO: 131 and SEQ ID NO: 138; SEQ ID NO: 131 and SEQ ID NO: 139; SEQ ID NO: 131 and SEQ ID NO: 140; SEQ ID NO: 131 and SEQ ID NO: 141; SEQ ID NO: 131 and SEQ ID NO: 142; SEQ ID NO: 131 and SEQ ID NO: 143; SEQ ID NO: 131 and SEQ ID NO: 144; SEQ ID NO: 131 and SEQ ID NO: 145; SEQ ID NO: 131 and SEQ ID NO: 146; SEQ ID NO: 131 and SEQ ID NO: 147; SEQ ID NO: 132 and SEQ ID NO: 133; SEQ ID NO: 132 and SEQ ID NO: 134; SEQ ID NO: 132 and SEQ ID NO: 135; SEQ ID NO: 132 and SEQ ID NO: 136; SEQ ID NO: 132 and SEQ ID NO: 137; SEQ ID NO: 132 and SEQ ID NO: 138; SEQ ID NO: 132 and SEQ ID NO: 139; SEQ ID NO: 132 and SEQ ID NO: 140; SEQ ID NO: 132 and SEQ ID NO: 141; SEQ ID NO: 132 and SEQ ID NO: 142; SEQ ID NO: 132 and SEQ ID NO: 143; SEQ ID NO: 132 and SEQ ID NO: 144; SEQ ID NO: 132 and SEQ ID NO: 145; SEQ ID NO: 132 and SEQ ID NO: 146; SEQ ID NO: 132 and SEQ ID NO: 147; SEQ ID NO: 133 and SEQ ID NO: 134; SEQ ID NO: 133 and SEQ ID NO: 135; SEQ ID NO: 133 and SEQ ID NO: 136; SEQ ID NO: 133 and SEQ ID NO: 137; SEQ ID NO: 133 and SEQ ID NO: 138; SEQ ID NO: 133 and SEQ ID NO: 139; SEQ ID NO: 133 and SEQ ID NO: 140; SEQ ID NO: 133 and SEQ ID NO: 141; SEQ ID NO: 133 and SEQ ID NO: 142; SEQ ID NO: 133 and SEQ ID NO: 143; SEQ ID NO: 133 and SEQ ID NO: 144; SEQ ID NO: 133 and SEQ ID NO: 145; SEQ ID NO: 133 and SEQ ID NO: 146; SEQ ID NO: 133 and SEQ ID NO: 147; SEQ ID NO: 134 and SEQ ID NO: 135; SEQ ID NO: 134 and SEQ ID NO: 136; SEQ ID NO: 134 and SEQ ID NO: 137; SEQ ID NO: 134 and SEQ ID NO: 138; SEQ ID NO: 134 and SEQ ID NO: 139; SEQ ID NO: 134 and SEQ ID NO: 140; SEQ ID NO: 134 and SEQ ID NO: 141; SEQ ID NO: 134 and SEQ ID NO: 142; SEQ ID NO: 134 and SEQ ID NO: 143; SEQ ID NO: 134 and SEQ ID NO: 144; SEQ ID NO: 134 and SEQ ID NO: 145; SEQ ID NO: 134 and SEQ ID NO: 146; SEQ ID NO: 134 and SEQ ID NO: 147; SEQ ID NO: 135 and SEQ ID NO: 136; SEQ ID NO: 135 and SEQ ID NO: 137; SEQ ID NO: 135 and SEQ ID NO: 138; SEQ ID NO: 135 and SEQ ID NO: 139; SEQ ID NO: 135 and SEQ ID NO: 140; SEQ ID NO: 135 and SEQ ID NO: 141; SEQ ID NO: 135 and SEQ ID NO: 142; SEQ ID NO: 135 and SEQ ID NO: 143; SEQ ID NO: 135 and SEQ ID NO: 144; SEQ ID NO: 135 and SEQ ID NO: 145; SEQ ID NO: 135 and SEQ ID NO: 146; SEQ ID NO: 135 and SEQ ID NO: 147; SEQ ID NO: 136 and SEQ ID NO: 137; SEQ ID NO: 136 and SEQ ID NO: 138; SEQ ID NO: 136 and SEQ ID NO: 139; SEQ ID NO: 136 and SEQ ID NO: 140; SEQ ID NO: 136 and SEQ ID NO: 141; SEQ ID NO: 136 and SEQ ID NO: 142; SEQ ID NO: 136 and SEQ ID NO: 143; SEQ ID NO: 136 and SEQ ID NO: 144; SEQ ID NO: 136 and SEQ ID NO: 145; SEQ ID NO: 136 and SEQ ID NO: 146; SEQ ID NO: 136 and SEQ ID NO: 147; SEQ ID NO: 137 and SEQ ID NO: 138; SEQ ID NO: 137 and SEQ ID NO: 139; SEQ ID NO: 137 and SEQ ID NO: 140; SEQ ID NO: 137 and SEQ ID NO: 141; SEQ ID NO: 137 and SEQ ID NO: 142; SEQ ID NO: 137 and SEQ ID NO: 143; SEQ ID NO: 137 and SEQ ID NO: 144; SEQ ID NO: 137 and SEQ ID NO: 145; SEQ ID NO: 137 and SEQ ID NO: 146; SEQ ID NO: 137 and SEQ ID NO: 147; SEQ ID NO: 138 and SEQ ID NO: 139; SEQ ID NO: 138 and SEQ ID NO: 140; SEQ ID NO: 138 and SEQ ID NO: 141; SEQ ID NO: 138 and SEQ ID NO: 142; SEQ ID NO: 138 and SEQ ID NO: 143; SEQ ID NO: 138 and SEQ ID NO: 144; SEQ ID NO: 138 and SEQ ID NO: 145; SEQ ID NO: 138 and SEQ ID NO: 146; SEQ ID NO: 138 and SEQ ID NO: 147; SEQ ID NO: 139 and SEQ ID NO: 140; SEQ ID NO: 139 and SEQ ID NO: 141; SEQ ID NO: 139 and SEQ ID NO: 142; SEQ ID NO: 139 and SEQ ID NO: 143; SEQ ID NO: 139 and SEQ ID NO: 144; SEQ ID NO: 139 and SEQ ID NO: 145; SEQ ID NO: 139 and SEQ ID NO: 146; SEQ ID NO: 139 and SEQ ID NO: 147; SEQ ID NO: 140 and SEQ ID NO: 141; SEQ ID NO: 140 and SEQ ID NO: 142; SEQ ID NO: 140 and SEQ ID NO: 143; SEQ ID NO: 140 and SEQ ID NO: 144; SEQ ID NO: 140 and SEQ ID NO: 145; SEQ ID NO: 140 and SEQ ID NO: 146; SEQ ID NO: 140 and SEQ ID NO: 147; SEQ ID NO: 141 and SEQ ID NO: 142; SEQ ID NO: 141 and SEQ ID NO: 143; SEQ ID NO: 141 and SEQ ID NO: 144; SEQ ID NO: 141 and SEQ ID NO: 145; SEQ ID NO: 141 and SEQ ID NO: 146; SEQ ID NO: 141 and SEQ ID NO: 147; SEQ ID NO: 142 and SEQ ID NO: 143; SEQ ID NO: 142 and SEQ ID NO: 144; SEQ ID NO: 142 and SEQ ID NO: 145; SEQ ID NO: 142 and SEQ ID NO: 146; SEQ ID NO: 142 and SEQ ID NO: 147; SEQ ID NO: 143 and SEQ ID NO: 144; SEQ ID NO: 143 and SEQ ID NO: 145; SEQ ID NO: 143 and SEQ ID NO: 146; SEQ ID NO: 143 and SEQ ID NO: 147; SEQ ID NO: 144 and SEQ ID NO: 145; SEQ ID NO: 144 and SEQ ID NO: 146; SEQ ID NO: 144 and SEQ ID NO: 147; SEQ ID NO: 145 and SEQ ID NO: 146; SEQ ID NO: 145 and SEQ ID NO: 147; SEQ ID NO: 146 and SEQ ID NO: 147; SEQ ID NO: 148 and SEQ ID NO: 149; SEQ ID NO: 148 and SEQ ID NO: 150; SEQ ID NO: 148 and SEQ ID NO: 151; SEQ ID NO: 148 and SEQ ID NO: 152; SEQ ID NO: 148 and SEQ ID NO: 153; SEQ ID NO: 148 and SEQ ID NO: 154; SEQ ID NO: 148 and SEQ ID NO: 155; SEQ ID NO: 148 and SEQ ID NO: 156; SEQ ID NO: 148 and SEQ ID NO: 157; SEQ ID NO: 148 and SEQ ID NO: 158; SEQ ID NO: 148 and SEQ ID NO: 159; SEQ ID NO: 149 and SEQ ID NO: 150; SEQ ID NO: 149 and SEQ ID NO: 151; SEQ ID NO: 149 and SEQ ID NO: 152; SEQ ID NO: 149 and SEQ ID NO: 153; SEQ ID NO: 149 and SEQ ID NO: 154; SEQ ID NO: 149 and SEQ ID NO: 155; SEQ ID NO: 149 and SEQ ID NO: 156; SEQ ID NO: 149 and SEQ ID NO: 157; SEQ ID NO: 149 and SEQ ID NO: 158; SEQ ID NO: 149 and SEQ ID NO: 159; SEQ ID NO: 150 and SEQ ID NO: 151; SEQ ID NO: 150 and SEQ ID NO: 152; SEQ ID NO: 150 and SEQ ID NO: 153; SEQ ID NO: 150 and SEQ ID NO: 154; SEQ ID NO: 150 and SEQ ID NO: 155; SEQ ID NO: 150 and SEQ ID NO: 156; SEQ ID NO: 150 and SEQ ID NO: 157; SEQ ID NO: 150 and SEQ ID NO: 158; SEQ ID NO: 150 and SEQ ID NO: 159; SEQ ID NO: 151 and SEQ ID NO: 152; SEQ ID NO: 151 and SEQ ID NO: 153; SEQ ID NO: 151 and SEQ ID NO: 154; SEQ ID NO: 151 and SEQ ID NO: 155; SEQ ID NO: 151 and SEQ ID NO: 156; SEQ ID NO: 151 and SEQ ID NO: 157; SEQ ID NO: 151 and SEQ ID NO: 158; SEQ ID NO: 151 and SEQ ID NO: 159; SEQ ID NO: 152 and SEQ ID NO: 153; SEQ ID NO: 152 and SEQ ID NO: 154; SEQ ID NO: 152 and SEQ ID NO: 155; SEQ ID NO: 152 and SEQ ID NO: 156; SEQ ID NO: 152 and SEQ ID NO: 157; SEQ ID NO: 152 and SEQ ID NO: 158; SEQ ID NO: 152 and SEQ ID NO: 159; SEQ ID NO: 153 and SEQ ID NO: 154; SEQ ID NO: 153 and SEQ ID NO: 155; SEQ ID NO: 153 and SEQ ID NO: 156; SEQ ID NO: 153 and SEQ ID NO: 157; SEQ ID NO: 153 and SEQ ID NO: 158; SEQ ID NO: 153 and SEQ ID NO: 159; SEQ ID NO: 154 and SEQ ID NO: 155; SEQ ID NO: 154 and SEQ ID NO: 156; SEQ ID NO: 154 and SEQ ID NO: 157; SEQ ID NO: 154 and SEQ ID NO: 158; SEQ ID NO: 154 and SEQ ID NO: 159; SEQ ID NO: 155 and SEQ ID NO: 156; SEQ ID NO: 155 and SEQ ID NO: 157; SEQ ID NO: 155 and SEQ ID NO: 158; SEQ ID NO: 155 and SEQ ID NO: 159; SEQ ID NO: 156 and SEQ ID NO: 157; SEQ ID NO: 156 and SEQ ID NO: 158; SEQ ID NO: 156 and SEQ ID NO: 159; SEQ ID NO: 157 and SEQ ID NO: 158; SEQ ID NO: 157 and SEQ ID NO: 159; SEQ ID NO: 158 and SEQ ID NO: 159; SEQ ID NO: 27 and SEQ ID NO: 28; SEQ ID NO: 27 and SEQ ID NO: 29; SEQ ID NO: 27 and SEQ ID NO: 30; SEQ ID NO: 27 and SEQ ID NO: 31; SEQ ID NO: 27 and SEQ ID NO: 32; SEQ ID NO: 27 and SEQ ID NO: 33; SEQ ID NO: 27 and SEQ ID NO: 34; SEQ ID NO: 27 and SEQ ID NO: 35; SEQ ID NO: 27 and SEQ ID NO: 36; SEQ ID NO: 27 and SEQ ID NO: 37; SEQ ID NO: 27 and SEQ ID NO: 38; SEQ ID NO: 27 and SEQ ID NO: 39; SEQ ID NO: 27 and SEQ ID NO: 40; SEQ ID NO: 27 and SEQ ID NO: 41; SEQ ID NO: 27 and SEQ ID NO: 42; SEQ ID NO: 27 and SEQ ID NO: 43; SEQ ID NO: 27 and SEQ ID NO: 44; SEQ ID NO: 27 and SEQ ID NO: 45; SEQ ID NO: 27 and SEQ ID NO: 46; SEQ ID NO: 27 and SEQ ID NO: 47; SEQ ID NO: 27 and SEQ ID NO: 48; SEQ ID NO: 27 and SEQ ID NO: 53; SEQ ID NO: 27 and SEQ ID NO: 54; SEQ ID NO: 27 and SEQ ID NO: 55; SEQ ID NO: 27 and SEQ ID NO: 56; SEQ ID NO: 27 and SEQ ID NO: 57; SEQ ID NO: 27 and SEQ ID NO: 58; SEQ ID NO: 27 and SEQ ID NO: 59; SEQ ID NO: 27 and SEQ ID NO: 60; SEQ ID NO: 27 and SEQ ID NO: 61; SEQ ID NO: 27 and SEQ ID NO: 62; SEQ ID NO: 27 and SEQ ID NO: 63; SEQ ID NO: 27 and SEQ ID NO: 64; SEQ ID NO: 27 and SEQ ID NO: 65; SEQ ID NO: 27 and SEQ ID NO: 66; SEQ ID NO: 27 and SEQ ID NO: 67; SEQ ID NO: 27 and SEQ ID NO: 68; SEQ ID NO: 27 and SEQ ID NO: 69; SEQ ID NO: 28 and SEQ ID NO: 29; SEQ ID NO: 28 and SEQ ID NO: 30; SEQ ID NO: 28 and SEQ ID NO: 31; SEQ ID NO: 28 and SEQ ID NO: 32; SEQ ID NO: 28 and SEQ ID NO: 33; SEQ ID NO: 28 and SEQ ID NO: 34; SEQ ID NO: 28 and SEQ ID NO: 35; SEQ ID NO: 28 and SEQ ID NO: 36; SEQ ID NO: 28 and SEQ ID NO: 37; SEQ ID NO: 28 and SEQ ID NO: 38; SEQ ID NO: 28 and SEQ ID NO: 39; SEQ ID NO: 28 and SEQ ID NO: 40; SEQ ID NO: 28 and SEQ ID NO: 41; SEQ ID NO: 28 and SEQ ID NO: 42; SEQ ID NO: 28 and SEQ ID NO: 43; SEQ ID NO: 28 and SEQ ID NO: 44; SEQ ID NO: 28 and SEQ ID NO: 45; SEQ ID NO: 28 and SEQ ID NO: 46; SEQ ID NO: 28 and SEQ ID NO: 47; SEQ ID NO: 28 and SEQ ID NO: 48; SEQ ID NO: 28 and SEQ ID NO: 53; SEQ ID NO: 28 and SEQ ID NO: 54; SEQ ID NO: 28 and SEQ ID NO: 55; SEQ ID NO: 28 and SEQ ID NO: 56; SEQ ID NO: 28 and SEQ ID NO: 57; SEQ ID NO: 28 and SEQ ID NO: 58; SEQ ID NO: 28 and SEQ ID NO: 59; SEQ ID NO: 28 and SEQ ID NO: 60; SEQ ID NO: 28 and SEQ ID NO: 61; SEQ ID NO: 28 and SEQ ID NO: 62; SEQ ID NO: 28 and SEQ ID NO: 63; SEQ ID NO: 28 and SEQ ID NO: 64; SEQ ID NO: 28 and SEQ ID NO: 65; SEQ ID NO: 28 and SEQ ID NO: 66; SEQ ID NO: 28 and SEQ ID NO: 67; SEQ ID NO: 28 and SEQ ID NO: 68; SEQ ID NO: 28 and SEQ ID NO: 69; SEQ ID NO: 29 and SEQ ID NO: 30; SEQ ID NO: 29 and SEQ ID NO: 31; SEQ ID NO: 29 and SEQ ID NO: 32; SEQ ID NO: 29 and SEQ ID NO: 33; SEQ ID NO: 29 and SEQ ID NO: 34; SEQ ID NO: 29 and SEQ ID NO: 35; SEQ ID NO: 29 and SEQ ID NO: 36; SEQ ID NO: 29 and SEQ ID NO: 37; SEQ ID NO: 29 and SEQ ID NO: 38; SEQ ID NO: 29 and SEQ ID NO: 39; SEQ ID NO: 29 and SEQ ID NO: 40; SEQ ID NO: 29 and SEQ ID NO: 41; SEQ ID NO: 29 and SEQ ID NO: 42; SEQ ID NO: 29 and SEQ ID NO: 43; SEQ ID NO: 29 and SEQ ID NO: 44; SEQ ID NO: 29 and SEQ ID NO: 45; SEQ ID NO: 29 and SEQ ID NO: 46; SEQ ID NO: 29 and SEQ ID NO: 47; SEQ ID NO: 29 and SEQ ID NO: 48; SEQ ID NO: 29 and SEQ ID NO: 53; SEQ ID NO: 29 and SEQ ID NO: 54; SEQ ID NO: 29 and SEQ ID NO: 55; SEQ ID NO: 29 and SEQ ID NO: 56; SEQ ID NO: 29 and SEQ ID NO: 57; SEQ ID NO: 29 and SEQ ID NO: 58; SEQ ID NO: 29 and SEQ ID NO: 59; SEQ ID NO: 29 and SEQ ID NO: 60; SEQ ID NO: 29 and SEQ ID NO: 61; SEQ ID NO: 29 and SEQ ID NO: 62; SEQ ID NO: 29 and SEQ ID NO: 63; SEQ ID NO: 29 and SEQ ID NO: 64; SEQ ID NO: 29 and SEQ ID NO: 65; SEQ ID NO: 29 and SEQ ID NO: 66; SEQ ID NO: 29 and SEQ ID NO: 67; SEQ ID NO: 29 and SEQ ID NO: 68; SEQ ID NO: 29 and SEQ ID NO: 69; SEQ ID NO: 30 and SEQ ID NO: 31; SEQ ID NO: 30 and SEQ ID NO: 32; SEQ ID NO: 30 and SEQ ID NO: 33; SEQ ID NO: 30 and SEQ ID NO: 34; SEQ ID NO: 30 and SEQ ID NO: 35; SEQ ID NO: 30 and SEQ ID NO: 36; SEQ ID NO: 30 and SEQ ID NO: 37; SEQ ID NO: 30 and SEQ ID NO: 38; SEQ ID NO: 30 and SEQ ID NO: 39; SEQ ID NO: 30 and SEQ ID NO: 40; SEQ ID NO: 30 and SEQ ID NO: 41; SEQ ID NO: 30 and SEQ ID NO: 42; SEQ ID NO: 30 and SEQ ID NO: 43; SEQ ID NO: 30 and SEQ ID NO: 44; SEQ ID NO: 30 and SEQ ID NO: 45; SEQ ID NO: 30 and SEQ ID NO: 46; SEQ ID NO: 30 and SEQ ID NO: 47; SEQ ID NO: 30 and SEQ ID NO: 48; SEQ ID NO: 30 and SEQ ID NO: 53; SEQ ID NO: 30 and SEQ ID NO: 54; SEQ ID NO: 30 and SEQ ID NO: 55; SEQ ID NO: 30 and SEQ ID NO: 56; SEQ ID NO: 30 and SEQ ID NO: 57; SEQ ID NO: 30 and SEQ ID NO: 58; SEQ ID NO: 30 and SEQ ID NO: 59; SEQ ID NO: 30 and SEQ ID NO: 60; SEQ ID NO: 30 and SEQ ID NO: 61; SEQ ID NO: 30 and SEQ ID NO: 62; SEQ ID NO: 30 and SEQ ID NO: 63; SEQ ID NO: 30 and SEQ ID NO: 64; SEQ ID NO: 30 and SEQ ID NO: 65; SEQ ID NO: 30 and SEQ ID NO: 66; SEQ ID NO: 30 and SEQ ID NO: 67; SEQ ID NO: 30 and SEQ ID NO: 68; SEQ ID NO: 30 and SEQ ID NO: 69; SEQ ID NO: 31 and SEQ ID NO: 32; SEQ ID NO: 31 and SEQ ID NO: 33; SEQ ID NO: 31 and SEQ ID NO: 34; SEQ ID NO: 31 and SEQ ID NO: 35; SEQ ID NO: 31 and SEQ ID NO: 36; SEQ ID NO: 31 and SEQ ID NO: 37; SEQ ID NO: 31 and SEQ ID NO: 38; SEQ ID NO: 31 and SEQ ID NO: 39; SEQ ID NO: 31 and SEQ ID NO: 40; SEQ ID NO: 31 and SEQ ID NO: 41; SEQ ID NO: 31 and SEQ ID NO: 42; SEQ ID NO: 31 and SEQ ID NO: 43; SEQ ID NO: 31 and SEQ ID NO: 44; SEQ ID NO: 31 and SEQ ID NO: 45; SEQ ID NO: 31 and SEQ ID NO: 46; SEQ ID NO: 31 and SEQ ID NO: 47; SEQ ID NO: 31 and SEQ ID NO: 48; SEQ ID NO: 31 and SEQ ID NO: 53; SEQ ID NO: 31 and SEQ ID NO: 54; SEQ ID NO: 31 and SEQ ID NO: 55; SEQ ID NO: 31 and SEQ ID NO: 56; SEQ ID NO: 31 and SEQ ID NO: 57; SEQ ID NO: 31 and SEQ ID NO: 58; SEQ ID NO: 31 and SEQ ID NO: 59; SEQ ID NO: 31 and SEQ ID NO: 60; SEQ ID NO: 31 and SEQ ID NO: 61; SEQ ID NO: 31 and SEQ ID NO: 62; SEQ ID NO: 31 and SEQ ID NO: 63; SEQ ID NO: 31 and SEQ ID NO: 64; SEQ ID NO: 31 and SEQ ID NO: 65; SEQ ID NO: 31 and SEQ ID NO: 66; SEQ ID NO: 31 and SEQ ID NO: 67; SEQ ID NO: 31 and SEQ ID NO: 68; SEQ ID NO: 31 and SEQ ID NO: 69; SEQ ID NO: 32 and SEQ ID NO: 33; SEQ ID NO: 32 and SEQ ID NO: 34; SEQ ID NO: 32 and SEQ ID NO: 35; SEQ ID NO: 32 and SEQ ID NO: 36; SEQ ID NO: 32 and SEQ ID NO: 37; SEQ ID NO: 32 and SEQ ID NO: 38; SEQ ID NO: 32 and SEQ ID NO: 39; SEQ ID NO: 32 and SEQ ID NO: 40; SEQ ID NO: 32 and SEQ ID NO: 41; SEQ ID NO: 32 and SEQ ID NO: 42; SEQ ID NO: 32 and SEQ ID NO: 43; SEQ ID NO: 32 and SEQ ID NO: 44; SEQ ID NO: 32 and SEQ ID NO: 45; SEQ ID NO: 32 and SEQ ID NO: 46; SEQ ID NO: 32 and SEQ ID NO: 47; SEQ ID NO: 32 and SEQ ID NO: 48; SEQ ID NO: 32 and SEQ ID NO: 53; SEQ ID NO: 32 and SEQ ID NO: 54; SEQ ID NO: 32 and SEQ ID NO: 55; SEQ ID NO: 32 and SEQ ID NO: 56; SEQ ID NO: 32 and SEQ ID NO: 57; SEQ ID NO: 32 and SEQ ID NO: 58; SEQ ID NO: 32 and SEQ ID NO: 59; SEQ ID NO: 32 and SEQ ID NO: 60; SEQ ID NO: 32 and SEQ ID NO: 61; SEQ ID NO: 32 and SEQ ID NO: 62; SEQ ID NO: 32 and SEQ ID NO: 63; SEQ ID NO: 32 and SEQ ID NO: 64; SEQ ID NO: 32 and SEQ ID NO: 65; SEQ ID NO: 32 and SEQ ID NO: 66; SEQ ID NO: 32 and SEQ ID NO: 67; SEQ ID NO: 32 and SEQ ID NO: 68; SEQ ID NO: 32 and SEQ ID NO: 69; SEQ ID NO: 33 and SEQ ID NO: 34; SEQ ID NO: 33 and SEQ ID NO: 35; SEQ ID NO: 33 and SEQ ID NO: 36; SEQ ID NO: 33 and SEQ ID NO: 37; SEQ ID NO: 33 and SEQ ID NO: 38; SEQ ID NO: 33 and SEQ ID NO: 39; SEQ ID NO: 33 and SEQ ID NO: 40; SEQ ID NO: 33 and SEQ ID NO: 41; SEQ ID NO: 33 and SEQ ID NO: 42; SEQ ID NO: 33 and SEQ ID NO: 43; SEQ ID NO: 33 and SEQ ID NO: 44; SEQ ID NO: 33 and SEQ ID NO: 45; SEQ ID NO: 33 and SEQ ID NO: 46; SEQ ID NO: 33 and SEQ ID NO: 47; SEQ ID NO: 33 and SEQ ID NO: 48; SEQ ID NO: 33 and SEQ ID NO: 53; SEQ ID NO: 33 and SEQ ID NO: 54; SEQ ID NO: 33 and SEQ ID NO: 55; SEQ ID NO: 33 and SEQ ID NO: 56; SEQ ID NO: 33 and SEQ ID NO: 57; SEQ ID NO: 33 and SEQ ID NO: 58; SEQ ID NO: 33 and SEQ ID NO: 59; SEQ ID NO: 33 and SEQ ID NO: 60; SEQ ID NO: 33 and SEQ ID NO: 61; SEQ ID NO: 33 and SEQ ID NO: 62; SEQ ID NO: 33 and SEQ ID NO: 63; SEQ ID NO: 33 and SEQ ID NO: 64; SEQ ID NO: 33 and SEQ ID NO: 65; SEQ ID NO: 33 and SEQ ID NO: 66; SEQ ID NO: 33 and SEQ ID NO: 67; SEQ ID NO: 33 and SEQ ID NO: 68; SEQ ID NO: 33 and SEQ ID NO: 69; SEQ ID NO: 34 and SEQ ID NO: 35; SEQ ID NO: 34 and SEQ ID NO: 36; SEQ ID NO: 34 and SEQ ID NO: 37; SEQ ID NO: 34 and SEQ ID NO: 38; SEQ ID NO: 34 and SEQ ID NO: 39; SEQ ID NO: 34 and SEQ ID NO: 40; SEQ ID NO: 34 and SEQ ID NO: 41; SEQ ID NO: 34 and SEQ ID NO: 42; SEQ ID NO: 34 and SEQ ID NO: 43; SEQ ID NO: 34 and SEQ ID NO: 44; SEQ ID NO: 34 and SEQ ID NO: 45; SEQ ID NO: 34 and SEQ ID NO: 46; SEQ ID NO: 34 and SEQ ID NO: 47; SEQ ID NO: 34 and SEQ ID NO: 48; SEQ ID NO: 34 and SEQ ID NO: 53; SEQ ID NO: 34 and SEQ ID NO: 54; SEQ ID NO: 34 and SEQ ID NO: 55; SEQ ID NO: 34 and SEQ ID NO: 56; SEQ ID NO: 34 and SEQ ID NO: 57; SEQ ID NO: 34 and SEQ ID NO: 58; SEQ ID NO: 34 and SEQ ID NO: 59; SEQ ID NO: 34 and SEQ ID NO: 60; SEQ ID NO: 34 and SEQ ID NO: 61; SEQ ID NO: 34 and SEQ ID NO: 62; SEQ ID NO: 34 and SEQ ID NO: 63; SEQ ID NO: 34 and SEQ ID NO: 64; SEQ ID NO: 34 and SEQ ID NO: 65; SEQ ID NO: 34 and SEQ ID NO: 66; SEQ ID NO: 34 and SEQ ID NO: 67; SEQ ID NO: 34 and SEQ ID NO: 68; SEQ ID NO: 34 and SEQ ID NO: 69; SEQ ID NO: 35 and SEQ ID NO: 36; SEQ ID NO: 35 and SEQ ID NO: 37; SEQ ID NO: 35 and SEQ ID NO: 38; SEQ ID NO: 35 and SEQ ID NO: 39; SEQ ID NO: 35 and SEQ ID NO: 40; SEQ ID NO: 35 and SEQ ID NO: 41; SEQ ID NO: 35 and SEQ ID NO: 42; SEQ ID NO: 35 and SEQ ID NO: 43; SEQ ID NO: 35 and SEQ ID NO: 44; SEQ ID NO: 35 and SEQ ID NO: 45; SEQ ID NO: 35 and SEQ ID NO: 46; SEQ ID NO: 35 and SEQ ID NO: 47; SEQ ID NO: 35 and SEQ ID NO: 48; SEQ ID NO: 35 and SEQ ID NO: 53; SEQ ID NO: 35 and SEQ ID NO: 54; SEQ ID NO: 35 and SEQ ID NO: 55; SEQ ID NO: 35 and SEQ ID NO: 56; SEQ ID NO: 35 and SEQ ID NO: 57; SEQ ID NO: 35 and SEQ ID NO: 58; SEQ ID NO: 35 and SEQ ID NO: 59; SEQ ID NO: 35 and SEQ ID NO: 60; SEQ ID NO: 35 and SEQ ID NO: 61; SEQ ID NO: 35 and SEQ ID NO: 62; SEQ ID NO: 35 and SEQ ID NO: 63; SEQ ID NO: 35 and SEQ ID NO: 64; SEQ ID NO: 35 and SEQ ID NO: 65; SEQ ID NO: 35 and SEQ ID NO: 66; SEQ ID NO: 35 and SEQ ID NO: 67; SEQ ID NO: 35 and SEQ ID NO: 68; SEQ ID NO: 35 and SEQ ID NO: 69; SEQ ID NO: 36 and SEQ ID NO: 37; SEQ ID NO: 36 and SEQ ID NO: 38; SEQ ID NO: 36 and SEQ ID NO: 39; SEQ ID NO: 36 and SEQ ID NO: 40; SEQ ID NO: 36 and SEQ ID NO: 41; SEQ ID NO: 36 and SEQ ID NO: 42; SEQ ID NO: 36 and SEQ ID NO: 43; SEQ ID NO: 36 and SEQ ID NO: 44; SEQ ID NO: 36 and SEQ ID NO: 45; SEQ ID NO: 36 and SEQ ID NO: 46; SEQ ID NO: 36 and SEQ ID NO: 47; SEQ ID NO: 36 and SEQ ID NO: 48; SEQ ID NO: 36 and SEQ ID NO: 53; SEQ ID NO: 36 and SEQ ID NO: 54; SEQ ID NO: 36 and SEQ ID NO: 55; SEQ ID NO: 36 and SEQ ID NO: 56; SEQ ID NO: 36 and SEQ ID NO: 57; SEQ ID NO: 36 and SEQ ID NO: 58; SEQ ID NO: 36 and SEQ ID NO: 59; SEQ ID NO: 36 and SEQ ID NO: 60; SEQ ID NO: 36 and SEQ ID NO: 61; SEQ ID NO: 36 and SEQ ID NO: 62; SEQ ID NO: 36 and SEQ ID NO: 63; SEQ ID NO: 36 and SEQ ID NO: 64; SEQ ID NO: 36 and SEQ ID NO: 65; SEQ ID NO: 36 and SEQ ID NO: 66; SEQ ID NO: 36 and SEQ ID NO: 67; SEQ ID NO: 36 and SEQ ID NO: 68; SEQ ID NO: 36 and SEQ ID NO: 69; SEQ ID NO: 37 and SEQ ID NO: 38; SEQ ID NO: 37 and SEQ ID NO: 39; SEQ ID NO: 37 and SEQ ID NO: 40; SEQ ID NO: 37 and SEQ ID NO: 41; SEQ ID NO: 37 and SEQ ID NO: 42; SEQ ID NO: 37 and SEQ ID NO: 43; SEQ ID NO: 37 and SEQ ID NO: 44; SEQ ID NO: 37 and SEQ ID NO: 45; SEQ ID NO: 37 and SEQ ID NO: 46; SEQ ID NO: 37 and SEQ ID NO: 47; SEQ ID NO: 37 and SEQ ID NO: 48; SEQ ID NO: 37 and SEQ ID NO: 53; SEQ ID NO: 37 and SEQ ID NO: 54; SEQ ID NO: 37 and SEQ ID NO: 55; SEQ ID NO: 37 and SEQ ID NO: 56; SEQ ID NO: 37 and SEQ ID NO: 57; SEQ ID NO: 37 and SEQ ID NO: 58; SEQ ID NO: 37 and SEQ ID NO: 59; SEQ ID NO: 37 and SEQ ID NO: 60; SEQ ID NO: 37 and SEQ ID NO: 61; SEQ ID NO: 37 and SEQ ID NO: 62; SEQ ID NO: 37 and SEQ ID NO: 63; SEQ ID NO: 37 and SEQ ID NO: 64; SEQ ID NO: 37 and SEQ ID NO: 65; SEQ ID NO: 37 and SEQ ID NO: 66; SEQ ID NO: 37 and SEQ ID NO: 67; SEQ ID NO: 37 and SEQ ID NO: 68; SEQ ID NO: 37 and SEQ ID NO: 69; SEQ ID NO: 38 and SEQ ID NO: 39; SEQ ID NO: 38 and SEQ ID NO: 40; SEQ ID NO: 38 and SEQ ID NO: 41; SEQ ID NO: 38 and SEQ ID NO: 42; SEQ ID NO: 38 and SEQ ID NO: 43; SEQ ID NO: 38 and SEQ ID NO: 44; SEQ ID NO: 38 and SEQ ID NO: 45; SEQ ID NO: 38 and SEQ ID NO: 46; SEQ ID NO: 38 and SEQ ID NO: 47; SEQ ID NO: 38 and SEQ ID NO: 48; SEQ ID NO: 38 and SEQ ID NO: 53; SEQ ID NO: 38 and SEQ ID NO: 54; SEQ ID NO: 38 and SEQ ID NO: 55; SEQ ID NO: 38 and SEQ ID NO: 56; SEQ ID NO: 38 and SEQ ID NO: 57; SEQ ID NO: 38 and SEQ ID NO: 58; SEQ ID NO: 38 and SEQ ID NO: 59; SEQ ID NO: 38 and SEQ ID NO: 60; SEQ ID NO: 38 and SEQ ID NO: 61; SEQ ID NO: 38 and SEQ ID NO: 62; SEQ ID NO: 38 and SEQ ID NO: 63; SEQ ID NO: 38 and SEQ ID NO: 64; SEQ ID NO: 38 and SEQ ID NO: 65; SEQ ID NO: 38 and SEQ ID NO: 66; SEQ ID NO: 38 and SEQ ID NO: 67; SEQ ID NO: 38 and SEQ ID NO: 68; SEQ ID NO: 38 and SEQ ID NO: 69; SEQ ID NO: 39 and SEQ ID NO: 40; SEQ ID NO: 39 and SEQ ID NO: 41; SEQ ID NO: 39 and SEQ ID NO: 42; SEQ ID NO: 39 and SEQ ID NO: 43; SEQ ID NO: 39 and SEQ ID NO: 44; SEQ ID NO: 39 and SEQ ID NO: 45; SEQ ID NO: 39 and SEQ ID NO: 46; SEQ ID NO: 39 and SEQ ID NO: 47; SEQ ID NO: 39 and SEQ ID NO: 48; SEQ ID NO: 39 and SEQ ID NO: 53; SEQ ID NO: 39 and SEQ ID NO: 54; SEQ ID NO: 39 and SEQ ID NO: 55; SEQ ID NO: 39 and SEQ ID NO: 56; SEQ ID NO: 39 and SEQ ID NO: 57; SEQ ID NO: 39 and SEQ ID NO: 58; SEQ ID NO: 39 and SEQ ID NO: 59; SEQ ID NO: 39 and SEQ ID NO: 60; SEQ ID NO: 39 and SEQ ID NO: 61; SEQ ID NO: 39 and SEQ ID NO: 62; SEQ ID NO: 39 and SEQ ID NO: 63; SEQ ID NO: 39 and SEQ ID NO: 64; SEQ ID NO: 39 and SEQ ID NO: 65; SEQ ID NO: 39 and SEQ ID NO: 66; SEQ ID NO: 39 and SEQ ID NO: 67; SEQ ID NO: 39 and SEQ ID NO: 68; SEQ ID NO: 39 and SEQ ID NO: 69; SEQ ID NO: 40 and SEQ ID NO: 41; SEQ ID NO: 40 and SEQ ID NO: 42; SEQ ID NO: 40 and SEQ ID NO: 43; SEQ ID NO: 40 and SEQ ID NO: 44; SEQ ID NO: 40 and SEQ ID NO: 45; SEQ ID NO: 40 and SEQ ID NO: 46; SEQ ID NO: 40 and SEQ ID NO: 47; SEQ ID NO: 40 and SEQ ID NO: 48; SEQ ID NO: 40 and SEQ ID NO: 53; SEQ ID NO: 40 and SEQ ID NO: 54; SEQ ID NO: 40 and SEQ ID NO: 55; SEQ ID NO: 40 and SEQ ID NO: 56; SEQ ID NO: 40 and SEQ ID NO: 57; SEQ ID NO: 40 and SEQ ID NO: 58; SEQ ID NO: 40 and SEQ ID NO: 59; SEQ ID NO: 40 and SEQ ID NO: 60; SEQ ID NO: 40 and SEQ ID NO: 61; SEQ ID NO: 40 and SEQ ID NO: 62; SEQ ID NO: 40 and SEQ ID NO: 63; SEQ ID NO: 40 and SEQ ID NO: 64; SEQ ID NO: 40 and SEQ ID NO: 65; SEQ ID NO: 40 and SEQ ID NO: 66; SEQ ID NO: 40 and SEQ ID NO: 67; SEQ ID NO: 40 and SEQ ID NO: 68; SEQ ID NO: 40 and SEQ ID NO: 69; SEQ ID NO: 41 and SEQ ID NO: 42; SEQ ID NO: 41 and SEQ ID NO: 43; SEQ ID NO: 41 and SEQ ID NO: 44; SEQ ID NO: 41 and SEQ ID NO: 45; SEQ ID NO: 41 and SEQ ID NO: 46; SEQ ID NO: 41 and SEQ ID NO: 47; SEQ ID NO: 41 and SEQ ID NO: 48; SEQ ID NO: 41 and SEQ ID NO: 53; SEQ ID NO: 41 and SEQ ID NO: 54; SEQ ID NO: 41 and SEQ ID NO: 55; SEQ ID NO: 41 and SEQ ID NO: 56; SEQ ID NO: 41 and SEQ ID NO: 57; SEQ ID NO: 41 and SEQ ID NO: 58; SEQ ID NO: 41 and SEQ ID NO: 59; SEQ ID NO: 41 and SEQ ID NO: 60; SEQ ID NO: 41 and SEQ ID NO: 61; SEQ ID NO: 41 and SEQ ID NO: 62; SEQ ID NO: 41 and SEQ ID NO: 63; SEQ ID NO: 41 and SEQ ID NO: 64; SEQ ID NO: 41 and SEQ ID NO: 65; SEQ ID NO: 41 and SEQ ID NO: 66; SEQ ID NO: 41 and SEQ ID NO: 67; SEQ ID NO: 41 and SEQ ID NO: 68; SEQ ID NO: 41 and SEQ ID NO: 69; SEQ ID NO: 42 and SEQ ID NO: 43; SEQ ID NO: 42 and SEQ ID NO: 44; SEQ ID NO: 42 and SEQ ID NO: 45; SEQ ID NO: 42 and SEQ ID NO: 46; SEQ ID NO: 42 and SEQ ID NO: 47; SEQ ID NO: 42 and SEQ ID NO: 48; SEQ ID NO: 42 and SEQ ID NO: 53; SEQ ID NO: 42 and SEQ ID NO: 54; SEQ ID NO: 42 and SEQ ID NO: 55; SEQ ID NO: 42 and SEQ ID NO: 56; SEQ ID NO: 42 and SEQ ID NO: 57; SEQ ID NO: 42 and SEQ ID NO: 58; SEQ ID NO: 42 and SEQ ID NO: 59; SEQ ID NO: 42 and SEQ ID NO: 60; SEQ ID NO: 42 and SEQ ID NO: 61; SEQ ID NO: 42 and SEQ ID NO: 62; SEQ ID NO: 42 and SEQ ID NO: 63; SEQ ID NO: 42 and SEQ ID NO: 64; SEQ ID NO: 42 and SEQ ID NO: 65; SEQ ID NO: 42 and SEQ ID NO: 66; SEQ ID NO: 42 and SEQ ID NO: 67; SEQ ID NO: 42 and SEQ ID NO: 68; SEQ ID NO: 42 and SEQ ID NO: 69; SEQ ID NO: 43 and SEQ ID NO: 44; SEQ ID NO: 43 and SEQ ID NO: 45; SEQ ID NO: 43 and SEQ ID NO: 46; SEQ ID NO: 43 and SEQ ID NO: 47; SEQ ID NO: 43 and SEQ ID NO: 48; SEQ ID NO: 43 and SEQ ID NO: 53; SEQ ID NO: 43 and SEQ ID NO: 54; SEQ ID NO: 43 and SEQ ID NO: 55; SEQ ID NO: 43 and SEQ ID NO: 56; SEQ ID NO: 43 and SEQ ID NO: 57; SEQ ID NO: 43 and SEQ ID NO: 58; SEQ ID NO: 43 and SEQ ID NO: 59; SEQ ID NO: 43 and SEQ ID NO: 60; SEQ ID NO: 43 and SEQ ID NO: 61; SEQ ID NO: 43 and SEQ ID NO: 62; SEQ ID NO: 43 and SEQ ID NO: 63; SEQ ID NO: 43 and SEQ ID NO: 64; SEQ ID NO: 43 and SEQ ID NO: 65; SEQ ID NO: 43 and SEQ ID NO: 66; SEQ ID NO: 43 and SEQ ID NO: 67; SEQ ID NO: 43 and SEQ ID NO: 68; SEQ ID NO: 43 and SEQ ID NO: 69; SEQ ID NO: 44 and SEQ ID NO: 45; SEQ ID NO: 44 and SEQ ID NO: 46; SEQ ID NO: 44 and SEQ ID NO: 47; SEQ ID NO: 44 and SEQ ID NO: 48; SEQ ID NO: 44 and SEQ ID NO: 53; SEQ ID NO: 44 and SEQ ID NO: 54; SEQ ID NO: 44 and SEQ ID NO: 55; SEQ ID NO: 44 and SEQ ID NO: 56; SEQ ID NO: 44 and SEQ ID NO: 57; SEQ ID NO: 44 and SEQ ID NO: 58; SEQ ID NO: 44 and SEQ ID NO: 59; SEQ ID NO: 44 and SEQ ID NO: 60; SEQ ID NO: 44 and SEQ ID NO: 61; SEQ ID NO: 44 and SEQ ID NO: 62; SEQ ID NO: 44 and SEQ ID NO: 63; SEQ ID NO: 44 and SEQ ID NO: 64; SEQ ID NO: 44 and SEQ ID NO: 65; SEQ ID NO: 44 and SEQ ID NO: 66; SEQ ID NO: 44 and SEQ ID NO: 67; SEQ ID NO: 44 and SEQ ID NO: 68; SEQ ID NO: 44 and SEQ ID NO: 69; SEQ ID NO: 45 and SEQ ID NO: 46; SEQ ID NO: 45 and SEQ ID NO: 47; SEQ ID NO: 45 and SEQ ID NO: 48; SEQ ID NO: 45 and SEQ ID NO: 53; SEQ ID NO: 45 and SEQ ID NO: 54; SEQ ID NO: 45 and SEQ ID NO: 55; SEQ ID NO: 45 and SEQ ID NO: 56; SEQ ID NO: 45 and SEQ ID NO: 57; SEQ ID NO: 45 and SEQ ID NO: 58; SEQ ID NO: 45 and SEQ ID NO: 59; SEQ ID NO: 45 and SEQ ID NO: 60; SEQ ID NO: 45 and SEQ ID NO: 61; SEQ ID NO: 45 and SEQ ID NO: 62; SEQ ID NO: 45 and SEQ ID NO: 63; SEQ ID NO: 45 and SEQ ID NO: 64; SEQ ID NO: 45 and SEQ ID NO: 65; SEQ ID NO: 45 and SEQ ID NO: 66; SEQ ID NO: 45 and SEQ ID NO: 67; SEQ ID NO: 45 and SEQ ID NO: 68; SEQ ID NO: 45 and SEQ ID NO: 69; SEQ ID NO: 46 and SEQ ID NO: 47; SEQ ID NO: 46 and SEQ ID NO: 48; SEQ ID NO: 46 and SEQ ID NO: 53; SEQ ID NO: 46 and SEQ ID NO: 54; SEQ ID NO: 46 and SEQ ID NO: 55; SEQ ID NO: 46 and SEQ ID NO: 56; SEQ ID NO: 46 and SEQ ID NO: 57; SEQ ID NO: 46 and SEQ ID NO: 58; SEQ ID NO: 46 and SEQ ID NO: 59; SEQ ID NO: 46 and SEQ ID NO: 60; SEQ ID NO: 46 and SEQ ID NO: 61; SEQ ID NO: 46 and SEQ ID NO: 62; SEQ ID NO: 46 and SEQ ID NO: 63; SEQ ID NO: 46 and SEQ ID NO: 64; SEQ ID NO: 46 and SEQ ID NO: 65; SEQ ID NO: 46 and SEQ ID NO: 66; SEQ ID NO: 46 and SEQ ID NO: 67; SEQ ID NO: 46 and SEQ ID NO: 68; SEQ ID NO: 46 and SEQ ID NO: 69; SEQ ID NO: 47 and SEQ ID NO: 48; SEQ ID NO: 47 and SEQ ID NO: 53; SEQ ID NO: 47 and SEQ ID NO: 54; SEQ ID NO: 47 and SEQ ID NO: 55; SEQ ID NO: 47 and SEQ ID NO: 56; SEQ ID NO: 47 and SEQ ID NO: 57; SEQ ID NO: 47 and SEQ ID NO: 58; SEQ ID NO: 47 and SEQ ID NO: 59; SEQ ID NO: 47 and SEQ ID NO: 60; SEQ ID NO: 47 and SEQ ID NO: 61; SEQ ID NO: 47 and SEQ ID NO: 62; SEQ ID NO: 47 and SEQ ID NO: 63; SEQ ID NO: 47 and SEQ ID NO: 64; SEQ ID NO: 47 and SEQ ID NO: 65; SEQ ID NO: 47 and SEQ ID NO: 66; SEQ ID NO: 47 and SEQ ID NO: 67; SEQ ID NO: 47 and SEQ ID NO: 68; SEQ ID NO: 47 and SEQ ID NO: 69; SEQ ID NO: 48 and SEQ ID NO: 53; SEQ ID NO: 48 and SEQ ID NO: 54; SEQ ID NO: 48 and SEQ ID NO: 55; SEQ ID NO: 48 and SEQ ID NO: 56; SEQ ID NO: 48 and SEQ ID NO: 57; SEQ ID NO: 48 and SEQ ID NO: 58; SEQ ID NO: 48 and SEQ ID NO: 59; SEQ ID NO: 48 and SEQ ID NO: 60; SEQ ID NO: 48 and SEQ ID NO: 61; SEQ ID NO: 48 and SEQ ID NO: 62; SEQ ID NO: 48 and SEQ ID NO: 63; SEQ ID NO: 48 and SEQ ID NO: 64; SEQ ID NO: 48 and SEQ ID NO: 65; SEQ ID NO: 48 and SEQ ID NO: 66; SEQ ID NO: 48 and SEQ ID NO: 67; SEQ ID NO: 48 and SEQ ID NO: 68; SEQ ID NO: 48 and SEQ ID NO: 69; SEQ ID NO: 53 and SEQ ID NO: 54; SEQ ID NO: 53 and SEQ ID NO: 55; SEQ ID NO: 53 and SEQ ID NO: 56; SEQ ID NO: 53 and SEQ ID NO: 57; SEQ ID NO: 53 and SEQ ID NO: 58; SEQ ID NO: 53 and SEQ ID NO: 59; SEQ ID NO: 53 and SEQ ID NO: 60; SEQ ID NO: 53 and SEQ ID NO: 61; SEQ ID NO: 53 and SEQ ID NO: 62; SEQ ID NO: 53 and SEQ ID NO: 63; SEQ ID NO: 53 and SEQ ID NO: 64; SEQ ID NO: 53 and SEQ ID NO: 65; SEQ ID NO: 53 and SEQ ID NO: 66; SEQ ID NO: 53 and SEQ ID NO: 67; SEQ ID NO: 53 and SEQ ID NO: 68; SEQ ID NO: 53 and SEQ ID NO: 69; SEQ ID NO: 54 and SEQ ID NO: 55; SEQ ID NO: 54 and SEQ ID NO: 56; SEQ ID NO: 54 and SEQ ID NO: 57; SEQ ID NO: 54 and SEQ ID NO: 58; SEQ ID NO: 54 and SEQ ID NO: 59; SEQ ID NO: 54 and SEQ ID NO: 60; SEQ ID NO: 54 and SEQ ID NO: 61; SEQ ID NO: 54 and SEQ ID NO: 62; SEQ ID NO: 54 and SEQ ID NO: 63; SEQ ID NO: 54 and SEQ ID NO: 64; SEQ ID NO: 54 and SEQ ID NO: 65; SEQ ID NO: 54 and SEQ ID NO: 66; SEQ ID NO: 54 and SEQ ID NO: 67; SEQ ID NO: 54 and SEQ ID NO: 68; SEQ ID NO: 54 and SEQ ID NO: 69; SEQ ID NO: 55 and SEQ ID NO: 56; SEQ ID NO: 55 and SEQ ID NO: 57; SEQ ID NO: 55 and SEQ ID NO: 58; SEQ ID NO: 55 and SEQ ID NO: 59; SEQ ID NO: 55 and SEQ ID NO: 60; SEQ ID NO: 55 and SEQ ID NO: 61; SEQ ID NO: 55 and SEQ ID NO: 62; SEQ ID NO: 55 and SEQ ID NO: 63; SEQ ID NO: 55 and SEQ ID NO: 64; SEQ ID NO: 55 and SEQ ID NO: 65; SEQ ID NO: 55 and SEQ ID NO: 66; SEQ ID NO: 55 and SEQ ID NO: 67; SEQ ID NO: 55 and SEQ ID NO: 68; SEQ ID NO: 55 and SEQ ID NO: 69; SEQ ID NO: 56 and SEQ ID NO: 57; SEQ ID NO: 56 and SEQ ID NO: 58; SEQ ID NO: 56 and SEQ ID NO: 59; SEQ ID NO: 56 and SEQ ID NO: 60; SEQ ID NO: 56 and SEQ ID NO: 61; SEQ ID NO: 56 and SEQ ID NO: 62; SEQ ID NO: 56 and SEQ ID NO: 63; SEQ ID NO: 56 and SEQ ID NO: 64; SEQ ID NO: 56 and SEQ ID NO: 65; SEQ ID NO: 56 and SEQ ID NO: 66; SEQ ID NO: 56 and SEQ ID NO: 67; SEQ ID NO: 56 and SEQ ID NO: 68; SEQ ID NO: 56 and SEQ ID NO: 69; SEQ ID NO: 57 and SEQ ID NO: 58; SEQ ID NO: 57 and SEQ ID NO: 59; SEQ ID NO: 57 and SEQ ID NO: 60; SEQ ID NO: 57 and SEQ ID NO: 61; SEQ ID NO: 57 and SEQ ID NO: 62; SEQ ID NO: 57 and SEQ ID NO: 63; SEQ ID NO: 57 and SEQ ID NO: 64; SEQ ID NO: 57 and SEQ ID NO: 65; SEQ ID NO: 57 and SEQ ID NO: 66; SEQ ID NO: 57 and SEQ ID NO: 67; SEQ ID NO: 57 and SEQ ID NO: 68; SEQ ID NO: 57 and SEQ ID NO: 69; SEQ ID NO: 58 and SEQ ID NO: 59; SEQ ID NO: 58 and SEQ ID NO: 60; SEQ ID NO: 58 and SEQ ID NO: 61; SEQ ID NO: 58 and SEQ ID NO: 62; SEQ ID NO: 58 and SEQ ID NO: 63; SEQ ID NO: 58 and SEQ ID NO: 64; SEQ ID NO: 58 and SEQ ID NO: 65; SEQ ID NO: 58 and SEQ ID NO: 66; SEQ ID NO: 58 and SEQ ID NO: 67; SEQ ID NO: 58 and SEQ ID NO: 68; SEQ ID NO: 58 and SEQ ID NO: 69; SEQ ID NO: 59 and SEQ ID NO: 60; SEQ ID NO: 59 and SEQ ID NO: 61; SEQ ID NO: 59 and SEQ ID NO: 62; SEQ ID NO: 59 and SEQ ID NO: 63; SEQ ID NO: 59 and SEQ ID NO: 64; SEQ ID NO: 59 and SEQ ID NO: 65; SEQ ID NO: 59 and SEQ ID NO: 66; SEQ ID NO: 59 and SEQ ID NO: 67; SEQ ID NO: 59 and SEQ ID NO: 68; SEQ ID NO: 59 and SEQ ID NO: 69; SEQ ID NO: 60 and SEQ ID NO: 61; SEQ ID NO: 60 and SEQ ID NO: 62; SEQ ID NO: 60 and SEQ ID NO: 63; SEQ ID NO: 60 and SEQ ID NO: 64; SEQ ID NO: 60 and SEQ ID NO: 65; SEQ ID NO: 60 and SEQ ID NO: 66; SEQ ID NO: 60 and SEQ ID NO: 67; SEQ ID NO: 60 and SEQ ID NO: 68; SEQ ID NO: 60 and SEQ ID NO: 69; SEQ ID NO: 61 and SEQ ID NO: 62; SEQ ID NO: 61 and SEQ ID NO: 63; SEQ ID NO: 61 and SEQ ID NO: 64; SEQ ID NO: 61 and SEQ ID NO: 65; SEQ ID NO: 61 and SEQ ID NO: 66; SEQ ID NO: 61 and SEQ ID NO: 67; SEQ ID NO: 61 and SEQ ID NO: 68; SEQ ID NO: 61 and SEQ ID NO: 69; SEQ ID NO: 62 and SEQ ID NO: 63; SEQ ID NO: 62 and SEQ ID NO: 64; SEQ ID NO: 62 and SEQ ID NO: 65; SEQ ID NO: 62 and SEQ ID NO: 66; SEQ ID NO: 62 and SEQ ID NO: 67; SEQ ID NO: 62 and SEQ ID NO: 68; SEQ ID NO: 62 and SEQ ID NO: 69; SEQ ID NO: 63 and SEQ ID NO: 64; SEQ ID NO: 63 and SEQ ID NO: 65; SEQ ID NO: 63 and SEQ ID NO: 66; SEQ ID NO: 63 and SEQ ID NO: 67; SEQ ID NO: 63 and SEQ ID NO: 68; SEQ ID NO: 63 and SEQ ID NO: 69; SEQ ID NO: 64 and SEQ ID NO: 65; SEQ ID NO: 64 and SEQ ID NO: 66; SEQ ID NO: 64 and SEQ ID NO: 67; SEQ ID NO: 64 and SEQ ID NO: 68; SEQ ID NO: 64 and SEQ ID NO: 69; SEQ ID NO: 65 and SEQ ID NO: 66; SEQ ID NO: 65 and SEQ ID NO: 67; SEQ ID NO: 65 and SEQ ID NO: 68; SEQ ID NO: 65 and SEQ ID NO: 69; SEQ ID NO: 66 and SEQ ID NO: 67; SEQ ID NO: 66 and SEQ ID NO: 68; SEQ ID NO: 66 and SEQ ID NO: 69; SEQ ID NO: 67 and SEQ ID NO: 68; SEQ ID NO: 67 and SEQ ID NO: 69; SEQ ID NO: 68 and SEQ ID NO: 69; SEQ ID NO: 71 and SEQ ID NO: 72; SEQ ID NO: 71 and SEQ ID NO: 73; SEQ ID NO: 71 and SEQ ID NO: 74; SEQ ID NO: 71 and SEQ ID NO: 75; SEQ ID NO: 71 and SEQ ID NO: 76; SEQ ID NO: 71 and SEQ ID NO: 77; SEQ ID NO: 71 and SEQ ID NO: 78; SEQ ID NO: 71 and SEQ ID NO: 84; SEQ ID NO: 71 and SEQ ID NO: 85; SEQ ID NO: 71 and SEQ ID NO: 86; SEQ ID NO: 71 and SEQ ID NO: 87; SEQ ID NO: 71 and SEQ ID NO: 88; SEQ ID NO: 71 and SEQ ID NO: 89; SEQ ID NO: 71 and SEQ ID NO: 90; SEQ ID NO: 71 and SEQ ID NO: 91; SEQ ID NO: 71 and SEQ ID NO: 92; SEQ ID NO: 71 and SEQ ID NO: 93; SEQ ID NO: 71 and SEQ ID NO: 94; SEQ ID NO: 71 and SEQ ID NO: 95; SEQ ID NO: 71 and SEQ ID NO: 96; SEQ ID NO: 71 and SEQ ID NO: 97; SEQ ID NO: 71 and SEQ ID NO: 98; SEQ ID NO: 71 and SEQ ID NO: 99; SEQ ID NO: 71 and SEQ ID NO: 100; SEQ ID NO: 71 and SEQ ID NO: 101; SEQ ID NO: 71 and SEQ ID NO: 102; SEQ ID NO: 72 and SEQ ID NO: 73; SEQ ID NO: 72 and SEQ ID NO: 74; SEQ ID NO: 72 and SEQ ID NO: 75; SEQ ID NO: 72 and SEQ ID NO: 76; SEQ ID NO: 72 and SEQ ID NO: 77; SEQ ID NO: 72 and SEQ ID NO: 78; SEQ ID NO: 72 and SEQ ID NO: 84; SEQ ID NO: 72 and SEQ ID NO: 85; SEQ ID NO: 72 and SEQ ID NO: 86; SEQ ID NO: 72 and SEQ ID NO: 87; SEQ ID NO: 72 and SEQ ID NO: 88; SEQ ID NO: 72 and SEQ ID NO: 89; SEQ ID NO: 72 and SEQ ID NO: 90; SEQ ID NO: 72 and SEQ ID NO: 91; SEQ ID NO: 72 and SEQ ID NO: 92; SEQ ID NO: 72 and SEQ ID NO: 93; SEQ ID NO: 72 and SEQ ID NO: 94; SEQ ID NO: 72 and SEQ ID NO: 95; SEQ ID NO: 72 and SEQ ID NO: 96; SEQ ID NO: 72 and SEQ ID NO: 97; SEQ ID NO: 72 and SEQ ID NO: 98; SEQ ID NO: 72 and SEQ ID NO: 99; SEQ ID NO: 72 and SEQ ID NO: 100; SEQ ID NO: 72 and SEQ ID NO: 101; SEQ ID NO: 72 and SEQ ID NO: 102; SEQ ID NO: 73 and SEQ ID NO: 74; SEQ ID NO: 73 and SEQ ID NO: 75; SEQ ID NO: 73 and SEQ ID NO: 76; SEQ ID NO: 73 and SEQ ID NO: 77; SEQ ID NO: 73 and SEQ ID NO: 78; SEQ ID NO: 73 and SEQ ID NO: 84; SEQ ID NO: 73 and SEQ ID NO: 85; SEQ ID NO: 73 and SEQ ID NO: 86; SEQ ID NO: 73 and SEQ ID NO: 87; SEQ ID NO: 73 and SEQ ID NO: 88; SEQ ID NO: 73 and SEQ ID NO: 89; SEQ ID NO: 73 and SEQ ID NO: 90; SEQ ID NO: 73 and SEQ ID NO: 91; SEQ ID NO: 73 and SEQ ID NO: 92; SEQ ID NO: 73 and SEQ ID NO: 93; SEQ ID NO: 73 and SEQ ID NO: 94; SEQ ID NO: 73 and SEQ ID NO: 95; SEQ ID NO: 73 and SEQ ID NO: 96; SEQ ID NO: 73 and SEQ ID NO: 97; SEQ ID NO: 73 and SEQ ID NO: 98; SEQ ID NO: 73 and SEQ ID NO: 99; SEQ ID NO: 73 and SEQ ID NO: 100; SEQ ID NO: 73 and SEQ ID NO: 101; SEQ ID NO: 73 and SEQ ID NO: 102; SEQ ID NO: 74 and SEQ ID NO: 75; SEQ ID NO: 74 and SEQ ID NO: 76; SEQ ID NO: 74 and SEQ ID NO: 77; SEQ ID NO: 74 and SEQ ID NO: 78; SEQ ID NO: 74 and SEQ ID NO: 84; SEQ ID NO: 74 and SEQ ID NO: 85; SEQ ID NO: 74 and SEQ ID NO: 86; SEQ ID NO: 74 and SEQ ID NO: 87; SEQ ID NO: 74 and SEQ ID NO: 88; SEQ ID NO: 74 and SEQ ID NO: 89; SEQ ID NO: 74 and SEQ ID NO: 90; SEQ ID NO: 74 and SEQ ID NO: 91; SEQ ID NO: 74 and SEQ ID NO: 92; SEQ ID NO: 74 and SEQ ID NO: 93; SEQ ID NO: 74 and SEQ ID NO: 94; SEQ ID NO: 74 and SEQ ID NO: 95; SEQ ID NO: 74 and SEQ ID NO: 96; SEQ ID NO: 74 and SEQ ID NO: 97; SEQ ID NO: 74 and SEQ ID NO: 98; SEQ ID NO: 74 and SEQ ID NO: 99; SEQ ID NO: 74 and SEQ ID NO: 100; SEQ ID NO: 74 and SEQ ID NO: 101; SEQ ID NO: 74 and SEQ ID NO: 102; SEQ ID NO: 75 and SEQ ID NO: 76; SEQ ID NO: 75 and SEQ ID NO: 77; SEQ ID NO: 75 and SEQ ID NO: 78; SEQ ID NO: 75 and SEQ ID NO: 84; SEQ ID NO: 75 and SEQ ID NO: 85; SEQ ID NO: 75 and SEQ ID NO: 86; SEQ ID NO: 75 and SEQ ID NO: 87; SEQ ID NO: 75 and SEQ ID NO: 88; SEQ ID NO: 75 and SEQ ID NO: 89; SEQ ID NO: 75 and SEQ ID NO: 90; SEQ ID NO: 75 and SEQ ID NO: 91; SEQ ID NO: 75 and SEQ ID NO: 92; SEQ ID NO: 75 and SEQ ID NO: 93; SEQ ID NO: 75 and SEQ ID NO: 94; SEQ ID NO: 75 and SEQ ID NO: 95; SEQ ID NO: 75 and SEQ ID NO: 96; SEQ ID NO: 75 and SEQ ID NO: 97; SEQ ID NO: 75 and SEQ ID NO: 98; SEQ ID NO: 75 and SEQ ID NO: 99; SEQ ID NO: 75 and SEQ ID NO: 100; SEQ ID NO: 75 and SEQ ID NO: 101; SEQ ID NO: 75 and SEQ ID NO: 102; SEQ ID NO: 76 and SEQ ID NO: 77; SEQ ID NO: 76 and SEQ ID NO: 78; SEQ ID NO: 76 and SEQ ID NO: 84; SEQ ID NO: 76 and SEQ ID NO: 85; SEQ ID NO: 76 and SEQ ID NO: 86; SEQ ID NO: 76 and SEQ ID NO: 87; SEQ ID NO: 76 and SEQ ID NO: 88; SEQ ID NO: 76 and SEQ ID NO: 89; SEQ ID NO: 76 and SEQ ID NO: 90; SEQ ID NO: 76 and SEQ ID NO: 91; SEQ ID NO: 76 and SEQ ID NO: 92; SEQ ID NO: 76 and SEQ ID NO: 93; SEQ ID NO: 76 and SEQ ID NO: 94; SEQ ID NO: 76 and SEQ ID NO: 95; SEQ ID NO: 76 and SEQ ID NO: 96; SEQ ID NO: 76 and SEQ ID NO: 97; SEQ ID NO: 76 and SEQ ID NO: 98; SEQ ID NO: 76 and SEQ ID NO: 99; SEQ ID NO: 76 and SEQ ID NO: 100; SEQ ID NO: 76 and SEQ ID NO: 101; SEQ ID NO: 76 and SEQ ID NO: 102; SEQ ID NO: 77 and SEQ ID NO: 78; SEQ ID NO: 77 and SEQ ID NO: 84; SEQ ID NO: 77 and SEQ ID NO: 85; SEQ ID NO: 77 and SEQ ID NO: 86; SEQ ID NO: 77 and SEQ ID NO: 87; SEQ ID NO: 77 and SEQ ID NO: 88; SEQ ID NO: 77 and SEQ ID NO: 89; SEQ ID NO: 77 and SEQ ID NO: 90; SEQ ID NO: 77 and SEQ ID NO: 91; SEQ ID NO: 77 and SEQ ID NO: 92; SEQ ID NO: 77 and SEQ ID NO: 93; SEQ ID NO: 77 and SEQ ID NO: 94; SEQ ID NO: 77 and SEQ ID NO: 95; SEQ ID NO: 77 and SEQ ID NO: 96; SEQ ID NO: 77 and SEQ ID NO: 97; SEQ ID NO: 77 and SEQ ID NO: 98; SEQ ID NO: 77 and SEQ ID NO: 99; SEQ ID NO: 77 and SEQ ID NO: 100; SEQ ID NO: 77 and SEQ ID NO: 101; SEQ ID NO: 77 and SEQ ID NO: 102; SEQ ID NO: 78 and SEQ ID NO: 84; SEQ ID NO: 78 and SEQ ID NO: 85; SEQ ID NO: 78 and SEQ ID NO: 86; SEQ ID NO: 78 and SEQ ID NO: 87; SEQ ID NO: 78 and SEQ ID NO: 88; SEQ ID NO: 78 and SEQ ID NO: 89; SEQ ID NO: 78 and SEQ ID NO: 90; SEQ ID NO: 78 and SEQ ID NO: 91; SEQ ID NO: 78 and SEQ ID NO: 92; SEQ ID NO: 78 and SEQ ID NO: 93; SEQ ID NO: 78 and SEQ ID NO: 94; SEQ ID NO: 78 and SEQ ID NO: 95; SEQ ID NO: 78 and SEQ ID NO: 96; SEQ ID NO: 78 and SEQ ID NO: 97; SEQ ID NO: 78 and SEQ ID NO: 98; SEQ ID NO: 78 and SEQ ID NO: 99; SEQ ID NO: 78 and SEQ ID NO: 100; SEQ ID NO: 78 and SEQ ID NO: 101; SEQ ID NO: 78 and SEQ ID NO: 102; SEQ ID NO: 84 and SEQ ID NO: 85; SEQ ID NO: 84 and SEQ ID NO: 86; SEQ ID NO: 84 and SEQ ID NO: 87; SEQ ID NO: 84 and SEQ ID NO: 88; SEQ ID NO: 84 and SEQ ID NO: 89; SEQ ID NO: 84 and SEQ ID NO: 90; SEQ ID NO: 84 and SEQ ID NO: 91; SEQ ID NO: 84 and SEQ ID NO: 92; SEQ ID NO: 84 and SEQ ID NO: 93; SEQ ID NO: 84 and SEQ ID NO: 94; SEQ ID NO: 84 and SEQ ID NO: 95; SEQ ID NO: 84 and SEQ ID NO: 96; SEQ ID NO: 84 and SEQ ID NO: 97; SEQ ID NO: 84 and SEQ ID NO: 98; SEQ ID NO: 84 and SEQ ID NO: 99; SEQ ID NO: 84 and SEQ ID NO: 100; SEQ ID NO: 84 and SEQ ID NO: 101; SEQ ID NO: 84 and SEQ ID NO: 102; SEQ ID NO: 85 and SEQ ID NO: 86; SEQ ID NO: 85 and SEQ ID NO: 87; SEQ ID NO: 85 and SEQ ID NO: 88; SEQ ID NO: 85 and SEQ ID NO: 89; SEQ ID NO: 85 and SEQ ID NO: 90; SEQ ID NO: 85 and SEQ ID NO: 91; SEQ ID NO: 85 and SEQ ID NO: 92; SEQ ID NO: 85 and SEQ ID NO: 93; SEQ ID NO: 85 and SEQ ID NO: 94; SEQ ID NO: 85 and SEQ ID NO: 95; SEQ ID NO: 85 and SEQ ID NO: 96; SEQ ID NO: 85 and SEQ ID NO: 97; SEQ ID NO: 85 and SEQ ID NO: 98; SEQ ID NO: 85 and SEQ ID NO: 99; SEQ ID NO: 85 and SEQ ID NO: 100; SEQ ID NO: 85 and SEQ ID NO: 101; SEQ ID NO: 85 and SEQ ID NO: 102; SEQ ID NO: 86 and SEQ ID NO: 87; SEQ ID NO: 86 and SEQ ID NO: 88; SEQ ID NO: 86 and SEQ ID NO: 89; SEQ ID NO: 86 and SEQ ID NO: 90; SEQ ID NO: 86 and SEQ ID NO: 91; SEQ ID NO: 86 and SEQ ID NO: 92; SEQ ID NO: 86 and SEQ ID NO: 93; SEQ ID NO: 86 and SEQ ID NO: 94; SEQ ID NO: 86 and SEQ ID NO: 95; SEQ ID NO: 86 and SEQ ID NO: 96; SEQ ID NO: 86 and SEQ ID NO: 97; SEQ ID NO: 86 and SEQ ID NO: 98; SEQ ID NO: 86 and SEQ ID NO: 99; SEQ ID NO: 86 and SEQ ID NO: 100; SEQ ID NO: 86 and SEQ ID NO: 101; SEQ ID NO: 86 and SEQ ID NO: 102; SEQ ID NO: 87 and SEQ ID NO: 88; SEQ ID NO: 87 and SEQ ID NO: 89; SEQ ID NO: 87 and SEQ ID NO: 90; SEQ ID NO: 87 and SEQ ID NO: 91; SEQ ID NO: 87 and SEQ ID NO: 92; SEQ ID NO: 87 and SEQ ID NO: 93; SEQ ID NO: 87 and SEQ ID NO: 94; SEQ ID NO: 87 and SEQ ID NO: 95; SEQ ID NO: 87 and SEQ ID NO: 96; SEQ ID NO: 87 and SEQ ID NO: 97; SEQ ID NO: 87 and SEQ ID NO: 98; SEQ ID NO: 87 and SEQ ID NO: 99; SEQ ID NO: 87 and SEQ ID NO: 100; SEQ ID NO: 87 and SEQ ID NO: 101; SEQ ID NO: 87 and SEQ ID NO: 102; SEQ ID NO: 88 and SEQ ID NO: 89; SEQ ID NO: 88 and SEQ ID NO: 90; SEQ ID NO: 88 and SEQ ID NO: 91; SEQ ID NO: 88 and SEQ ID NO: 92; SEQ ID NO: 88 and SEQ ID NO: 93; SEQ ID NO: 88 and SEQ ID NO: 94; SEQ ID NO: 88 and SEQ ID NO: 95; SEQ ID NO: 88 and SEQ ID NO: 96; SEQ ID NO: 88 and SEQ ID NO: 97; SEQ ID NO: 88 and SEQ ID NO: 98; SEQ ID NO: 88 and SEQ ID NO: 99; SEQ ID NO: 88 and SEQ ID NO: 100; SEQ ID NO: 88 and SEQ ID NO: 101; SEQ ID NO: 88 and SEQ ID NO: 102; SEQ ID NO: 89 and SEQ ID NO: 90; SEQ ID NO: 89 and SEQ ID NO: 91; SEQ ID NO: 89 and SEQ ID NO: 92; SEQ ID NO: 89 and SEQ ID NO: 93; SEQ ID NO: 89 and SEQ ID NO: 94; SEQ ID NO: 89 and SEQ ID NO: 95; SEQ ID NO: 89 and SEQ ID NO: 96; SEQ ID NO: 89 and SEQ ID NO: 97; SEQ ID NO: 89 and SEQ ID NO: 98; SEQ ID NO: 89 and SEQ ID NO: 99; SEQ ID NO: 89 and SEQ ID NO: 100; SEQ ID NO: 89 and SEQ ID NO: 101; SEQ ID NO: 89 and SEQ ID NO: 102; SEQ ID NO: 90 and SEQ ID NO: 91; SEQ ID NO: 90 and SEQ ID NO: 92; SEQ ID NO: 90 and SEQ ID NO: 93; SEQ ID NO: 90 and SEQ ID NO: 94; SEQ ID NO: 90 and SEQ ID NO: 95; SEQ ID NO: 90 and SEQ ID NO: 96; SEQ ID NO: 90 and SEQ ID NO: 97; SEQ ID NO: 90 and SEQ ID NO: 98; SEQ ID NO: 90 and SEQ ID NO: 99; SEQ ID NO: 90 and SEQ ID NO: 100; SEQ ID NO: 90 and SEQ ID NO: 101; SEQ ID NO: 90 and SEQ ID NO: 102; SEQ ID NO: 91 and SEQ ID NO: 92; SEQ ID NO: 91 and SEQ ID NO: 93; SEQ ID NO: 91 and SEQ ID NO: 94; SEQ ID NO: 91 and SEQ ID NO: 95; SEQ ID NO: 91 and SEQ ID NO: 96; SEQ ID NO: 91 and SEQ ID NO: 97; SEQ ID NO: 91 and SEQ ID NO: 98; SEQ ID NO: 91 and SEQ ID NO: 99; SEQ ID NO: 91 and SEQ ID NO: 100; SEQ ID NO: 91 and SEQ ID NO: 101; SEQ ID NO: 91 and SEQ ID NO: 102; SEQ ID NO: 92 and SEQ ID NO: 93; SEQ ID NO: 92 and SEQ ID NO: 94; SEQ ID NO: 92 and SEQ ID NO: 95; SEQ ID NO: 92 and SEQ ID NO: 96; SEQ ID NO: 92 and SEQ ID NO: 97; SEQ ID NO: 92 and SEQ ID NO: 98; SEQ ID NO: 92 and SEQ ID NO: 99; SEQ ID NO: 92 and SEQ ID NO: 100; SEQ ID NO: 92 and SEQ ID NO: 101; SEQ ID NO: 92 and SEQ ID NO: 102; SEQ ID NO: 93 and SEQ ID NO: 94; SEQ ID NO: 93 and SEQ ID NO: 95; SEQ ID NO: 93 and SEQ ID NO: 96; SEQ ID NO: 93 and SEQ ID NO: 97; SEQ ID NO: 93 and SEQ ID NO: 98; SEQ ID NO: 93 and SEQ ID NO: 99; SEQ ID NO: 93 and SEQ ID NO: 100; SEQ ID NO: 93 and SEQ ID NO: 101; SEQ ID NO: 93 and SEQ ID NO: 102; SEQ ID NO: 94 and SEQ ID NO: 95; SEQ ID NO: 94 and SEQ ID NO: 96; SEQ ID NO: 94 and SEQ ID NO: 97; SEQ ID NO: 94 and SEQ ID NO: 98; SEQ ID NO: 94 and SEQ ID NO: 99; SEQ ID NO: 94 and SEQ ID NO: 100; SEQ ID NO: 94 and SEQ ID NO: 101; SEQ ID NO: 94 and SEQ ID NO: 102; SEQ ID NO: 95 and SEQ ID NO: 96; SEQ ID NO: 95 and SEQ ID NO: 97; SEQ ID NO: 95 and SEQ ID NO: 98; SEQ ID NO: 95 and SEQ ID NO: 99; SEQ ID NO: 95 and SEQ ID NO: 100; SEQ ID NO: 95 and SEQ ID NO: 101; SEQ ID NO: 95 and SEQ ID NO: 102; SEQ ID NO: 96 and SEQ ID NO: 97; SEQ ID NO: 96 and SEQ ID NO: 98; SEQ ID NO: 96 and SEQ ID NO: 99; SEQ ID NO: 96 and SEQ ID NO: 100; SEQ ID NO: 96 and SEQ ID NO: 101; SEQ ID NO: 96 and SEQ ID NO: 102; SEQ ID NO: 97 and SEQ ID NO: 98; SEQ ID NO: 97 and SEQ ID NO: 99; SEQ ID NO: 97 and SEQ ID NO: 100; SEQ ID NO: 97 and SEQ ID NO: 101; SEQ ID NO: 97 and SEQ ID NO: 102; SEQ ID NO: 98 and SEQ ID NO: 99; SEQ ID NO: 98 and SEQ ID NO: 100; SEQ ID NO: 98 and SEQ ID NO: 101; SEQ ID NO: 98 and SEQ ID NO: 102; SEQ ID NO: 99 and SEQ ID NO: 100; SEQ ID NO: 99 and SEQ ID NO: 101; SEQ ID NO: 99 and SEQ ID NO: 102; SEQ ID NO: 100 and SEQ ID NO: 101; SEQ ID NO: 100 and SEQ ID NO: 102; SEQ ID NO: 101 and SEQ ID NO: 102; and a nucleic acid encoding a Staphylococcus aureus Cas9 (SaCas9), wherein the nucleic acid encoding the SaCas9 may be on the same or different nucleic acid molecule as the pair of guide RNAs.

[0358] In some embodiments, methods are provided for treating Duchenne Muscular Dystrophy (DMD), the method comprising delivering to a cell at least one nucleic acid molecule comprising a pair of guide RNAs comprising a first and second spacer sequence, wherein the pair of first and spacer sequences are selected from any one of the following pairs: SEQ ID NO: 200 and SEQ ID NO: 201; SEQ ID NO: 200 and SEQ ID NO: 202; SEQ ID NO: 200 and SEQ ID NO: 203; SEQ ID NO: 200 and SEQ ID NO: 204; SEQ ID NO: 200 and SEQ ID NO: 205; SEQ ID NO: 200 and SEQ ID NO: 206; SEQ ID NO: 200 and SEQ ID NO: 207; SEQ ID NO: 200 and SEQ ID NO: 208; SEQ ID NO: 201 and SEQ ID NO: 202; SEQ ID NO: 201 and SEQ ID NO: 203; SEQ ID NO: 201 and SEQ ID NO: 204; SEQ ID NO: 201 and SEQ ID NO: 205; SEQ ID NO: 201 and SEQ ID NO: 206; SEQ ID NO: 201 and SEQ ID NO: 207; SEQ ID NO: 201 and SEQ ID NO: 208; SEQ ID NO: 202 and SEQ ID NO: 203; SEQ ID NO: 202 and SEQ ID NO: 204; SEQ ID NO: 202 and SEQ ID NO: 205; SEQ ID NO: 202 and SEQ ID NO: 206; SEQ ID NO: 202 and SEQ ID NO: 207; SEQ ID NO: 202 and SEQ ID NO: 208; SEQ ID NO: 203 and SEQ ID NO: 204; SEQ ID NO: 203 and SEQ ID NO: 205; SEQ ID NO: 203 and SEQ ID NO: 206; SEQ ID NO: 203 and SEQ ID NO: 207; SEQ ID NO: 203 and SEQ ID NO: 208; SEQ ID NO: 204 and SEQ ID NO: 205; SEQ ID NO: 204 and SEQ ID NO: 206; SEQ ID NO: 204 and SEQ ID NO: 207; SEQ ID NO: 204 and SEQ ID NO: 208; SEQ ID NO: 205 and SEQ ID NO: 206; SEQ ID NO: 205 and SEQ ID NO: 207; SEQ ID NO: 205 and SEQ ID NO: 208; SEQ ID NO: 206 and SEQ ID NO: 207; SEQ ID NO: 206 and SEQ ID NO: 208; SEQ ID NO: 207 and SEQ ID NO: 208; SEQ ID NO: 209 and SEQ ID NO: 210; SEQ ID NO: 209 and SEQ ID NO: 211; SEQ ID NO: 209 and SEQ ID NO: 212; SEQ ID NO: 209 and SEQ ID NO: 213; SEQ ID NO: 209 and SEQ ID NO: 214; SEQ ID NO: 209 and SEQ ID NO: 215; SEQ ID NO: 209 and SEQ ID NO: 216; SEQ ID NO: 209 and SEQ ID NO: 217; SEQ ID NO: 209 and SEQ ID NO: 218; SEQ ID NO: 209 and SEQ ID NO: 219; SEQ ID NO: 209 and SEQ ID NO: 220; SEQ ID NO: 209 and SEQ ID NO: 221; SEQ ID NO: 209 and SEQ ID NO: 222; SEQ ID NO: 209 and SEQ ID NO: 223; SEQ ID NO: 209 and SEQ ID NO: 224; SEQ ID NO: 209 and SEQ ID NO: 225; SEQ ID NO: 209 and SEQ ID NO: 226; SEQ ID NO: 209 and SEQ ID NO: 227; SEQ ID NO: 209 and SEQ ID NO: 228; SEQ ID NO: 209 and SEQ ID NO: 229; SEQ ID NO: 209 and SEQ ID NO: 230; SEQ ID NO: 210 and SEQ ID NO: 211; SEQ ID NO: 210 and SEQ ID NO: 212; SEQ ID NO: 210 and SEQ ID NO: 213; SEQ ID NO: 210 and SEQ ID NO: 214; SEQ ID NO: 210 and SEQ ID NO: 215; SEQ ID NO: 210 and SEQ ID NO: 216; SEQ ID NO: 210 and SEQ ID NO: 217; SEQ ID NO: 210 and SEQ ID NO: 218; SEQ ID NO: 210 and SEQ ID NO: 219; SEQ ID NO: 210 and SEQ ID NO: 220; SEQ ID NO: 210 and SEQ ID NO: 221; SEQ ID NO: 210 and SEQ ID NO: 222; SEQ ID NO: 210 and SEQ ID NO: 223; SEQ ID NO: 210 and SEQ ID NO: 224; SEQ ID NO: 210 and SEQ ID NO: 225; SEQ ID NO: 210 and SEQ ID NO: 226; SEQ ID NO: 210 and SEQ ID NO: 227; SEQ ID NO: 210 and SEQ ID NO: 228; SEQ ID NO: 210 and SEQ ID NO: 229; SEQ ID NO: 210 and SEQ ID NO: 230; SEQ ID NO: 211 and SEQ ID NO: 212; SEQ ID NO: 211 and SEQ ID NO: 213; SEQ ID NO: 211 and SEQ ID NO: 214; SEQ ID NO: 211 and SEQ ID NO: 215; SEQ ID NO: 211 and SEQ ID NO: 216; SEQ ID NO: 211 and SEQ ID NO: 217; SEQ ID NO: 211 and SEQ ID NO: 218; SEQ ID NO: 211 and SEQ ID NO: 219; SEQ ID NO: 211 and SEQ ID NO: 220; SEQ ID NO: 211 and SEQ ID NO: 221; SEQ ID NO: 211 and SEQ ID NO: 222; SEQ ID NO: 211 and SEQ ID NO: 223; SEQ ID NO: 211 and SEQ ID NO: 224; SEQ ID NO: 211 and SEQ ID NO: 225; SEQ ID NO: 211 and SEQ ID NO: 226; SEQ ID NO: 211 and SEQ ID NO: 227; SEQ ID NO: 211 and SEQ ID NO: 228; SEQ ID NO: 211 and SEQ ID NO: 229; SEQ ID NO: 211 and SEQ ID NO: 230; SEQ ID NO: 212 and SEQ ID NO: 213; SEQ ID NO: 212 and SEQ ID NO: 214; SEQ ID NO: 212 and SEQ ID NO: 215; SEQ ID NO: 212 and SEQ ID NO: 216; SEQ ID NO: 212 and SEQ ID NO: 217; SEQ ID NO: 212 and SEQ ID NO: 218; SEQ ID NO: 212 and SEQ ID NO: 219; SEQ ID NO: 212 and SEQ ID NO: 220; SEQ ID NO: 212 and SEQ ID NO: 221; SEQ ID NO: 212 and SEQ ID NO: 222; SEQ ID NO: 212 and SEQ ID NO: 223; SEQ ID NO: 212 and SEQ ID NO: 224; SEQ ID NO: 212 and SEQ ID NO: 225; SEQ ID NO: 212 and SEQ ID NO: 226; SEQ ID NO: 212 and SEQ ID NO: 227; SEQ ID NO: 212 and SEQ ID NO: 228; SEQ ID NO: 212 and SEQ ID NO: 229; SEQ ID NO: 212 and SEQ ID NO: 230; SEQ ID NO: 213 and SEQ ID NO: 214; SEQ ID NO: 213 and SEQ ID NO: 215; SEQ ID NO: 213 and SEQ ID NO: 216; SEQ ID NO: 213 and SEQ ID NO: 217; SEQ ID NO: 213 and SEQ ID NO: 218; SEQ ID NO: 213 and SEQ ID NO: 219; SEQ ID NO: 213 and SEQ ID NO: 220; SEQ ID NO: 213 and SEQ ID NO: 221; SEQ ID NO: 213 and SEQ ID NO: 222; SEQ ID NO: 213 and SEQ ID NO: 223; SEQ ID NO: 213 and SEQ ID NO: 224; SEQ ID NO: 213 and SEQ ID NO: 225; SEQ ID NO: 213 and SEQ ID NO: 226; SEQ ID NO: 213 and SEQ ID NO: 227; SEQ ID NO: 213 and SEQ ID NO: 228; SEQ ID NO: 213 and SEQ ID NO: 229; SEQ ID NO: 213 and SEQ ID NO: 230; SEQ ID NO: 214 and SEQ ID NO: 215; SEQ ID NO: 214 and SEQ ID NO: 216; SEQ ID NO: 214 and SEQ ID NO: 217; SEQ ID NO: 214 and SEQ ID NO: 218; SEQ ID NO: 214 and SEQ ID NO: 219; SEQ ID NO: 214 and SEQ ID NO: 220; SEQ ID NO: 214 and SEQ ID NO: 221; SEQ ID NO: 214 and SEQ ID NO: 222; SEQ ID NO: 214 and SEQ ID NO: 223; SEQ ID NO: 214 and SEQ ID NO: 224; SEQ ID NO: 214 and SEQ ID NO: 225; SEQ ID NO: 214 and SEQ ID NO: 226; SEQ ID NO: 214 and SEQ ID NO: 227; SEQ ID NO: 214 and SEQ ID NO: 228; SEQ ID NO: 214 and SEQ ID NO: 229; SEQ ID NO: 214 and SEQ ID NO: 230; SEQ ID NO: 215 and SEQ ID NO: 216; SEQ ID NO: 215 and SEQ ID NO: 217; SEQ ID NO: 215 and SEQ ID NO: 218; SEQ ID NO: 215 and SEQ ID NO: 219; SEQ ID NO: 215 and SEQ ID NO: 220; SEQ ID NO: 215 and SEQ ID NO: 221; SEQ ID NO: 215 and SEQ ID NO: 222; SEQ ID NO: 215 and SEQ ID NO: 223; SEQ ID NO: 215 and SEQ ID NO: 224; SEQ ID NO: 215 and SEQ ID NO: 225; SEQ ID NO: 215 and SEQ ID NO: 226; SEQ ID NO: 215 and SEQ ID NO: 227; SEQ ID NO: 215 and SEQ ID NO: 228; SEQ ID NO: 215 and SEQ ID NO: 229; SEQ ID NO: 215 and SEQ ID NO: 230; SEQ ID NO: 216 and SEQ ID NO: 217; SEQ ID NO: 216 and SEQ ID NO: 218; SEQ ID NO: 216 and SEQ ID NO: 219; SEQ ID NO: 216 and SEQ ID NO: 220; SEQ ID NO: 216 and SEQ ID NO: 221; SEQ ID NO: 216 and SEQ ID NO: 222; SEQ ID NO: 216 and SEQ ID NO: 223; SEQ ID NO: 216 and SEQ ID NO: 224; SEQ ID NO: 216 and SEQ ID NO: 225; SEQ ID NO: 216 and SEQ ID NO: 226; SEQ ID NO: 216 and SEQ ID NO: 227; SEQ ID NO: 216 and SEQ ID NO: 228; SEQ ID NO: 216 and SEQ ID NO: 229; SEQ ID NO: 216 and SEQ ID NO: 230; SEQ ID NO: 217 and SEQ ID NO: 218; SEQ ID NO: 217 and SEQ ID NO: 219; SEQ ID NO: 217 and SEQ ID NO: 220; SEQ ID NO: 217 and SEQ ID NO: 221; SEQ ID NO: 217 and SEQ ID NO: 222; SEQ ID NO: 217 and SEQ ID NO: 223; SEQ ID NO: 217 and SEQ ID NO: 224; SEQ ID NO: 217 and SEQ ID NO: 225; SEQ ID NO: 217 and SEQ ID NO: 226; SEQ ID NO: 217 and SEQ ID NO: 227; SEQ ID NO: 217 and SEQ ID NO: 228; SEQ ID NO: 217 and SEQ ID NO: 229; SEQ ID NO: 217 and SEQ ID NO: 230; SEQ ID NO: 218 and SEQ ID NO: 219; SEQ ID NO: 218 and SEQ ID NO: 220; SEQ ID NO: 218 and SEQ ID NO: 221; SEQ ID NO: 218 and SEQ ID NO: 222; SEQ ID NO: 218 and SEQ ID NO: 223; SEQ ID NO: 218 and SEQ ID NO: 224; SEQ ID NO: 218 and SEQ ID NO: 225; SEQ ID NO: 218 and SEQ ID NO: 226; SEQ ID NO: 218 and SEQ ID NO: 227; SEQ ID NO: 218 and SEQ ID NO: 228; SEQ ID NO: 218 and SEQ ID NO: 229; SEQ ID NO: 218 and SEQ ID NO: 230; SEQ ID NO: 219 and SEQ ID NO: 220; SEQ ID NO: 219 and SEQ ID NO: 221; SEQ ID NO: 219 and SEQ ID NO: 222; SEQ ID NO: 219 and SEQ ID NO: 223; SEQ ID NO: 219 and SEQ ID NO: 224; SEQ ID NO: 219 and SEQ ID NO: 225; SEQ ID NO: 219 and SEQ ID NO: 226; SEQ ID NO: 219 and SEQ ID NO: 227; SEQ ID NO: 219 and SEQ ID NO: 228; SEQ ID NO: 219 and SEQ ID NO: 229; SEQ ID NO: 219 and SEQ ID NO: 230; SEQ ID NO: 220 and SEQ ID NO: 221; SEQ ID NO: 220 and SEQ ID NO: 222; SEQ ID NO: 220 and SEQ ID NO: 223; SEQ ID NO: 220 and SEQ ID NO: 224; SEQ ID NO: 220 and SEQ ID NO: 225; SEQ ID NO: 220 and SEQ ID NO: 226; SEQ ID NO: 220 and SEQ ID NO: 227; SEQ ID NO: 220 and SEQ ID NO: 228; SEQ ID NO: 220 and SEQ ID NO: 229; SEQ ID NO: 220 and SEQ ID NO: 230; SEQ ID NO: 221 and SEQ ID NO: 222; SEQ ID NO: 221 and SEQ ID NO: 223; SEQ ID NO: 221 and SEQ ID NO: 224; SEQ ID NO: 221 and SEQ ID NO: 225; SEQ ID NO: 221 and SEQ ID NO: 226; SEQ ID NO: 221 and SEQ ID NO: 227; SEQ ID NO: 221 and SEQ ID NO: 228; SEQ ID NO: 221 and SEQ ID NO: 229; SEQ ID NO: 221 and SEQ ID NO: 230; SEQ ID NO: 222 and SEQ ID NO: 223; SEQ ID NO: 222 and SEQ ID NO: 224; SEQ ID NO: 222 and SEQ ID NO: 225; SEQ ID NO: 222 and SEQ ID NO: 226; SEQ ID NO: 222 and SEQ ID NO: 227; SEQ ID NO: 222 and SEQ ID NO: 228; SEQ ID NO: 222 and SEQ ID NO: 229; SEQ ID NO: 222 and SEQ ID NO: 230; SEQ ID NO: 223 and SEQ ID NO: 224; SEQ ID NO: 223 and SEQ ID NO: 225; SEQ ID NO: 223 and SEQ ID NO: 226; SEQ ID NO: 223 and SEQ ID NO: 227; SEQ ID NO: 223 and SEQ ID NO: 228; SEQ ID NO: 223 and SEQ ID NO: 229; SEQ ID NO: 223 and SEQ ID NO: 230; SEQ ID NO: 224 and SEQ ID NO: 225; SEQ ID NO: 224 and SEQ ID NO: 226; SEQ ID NO: 224 and SEQ ID NO: 227; SEQ ID NO: 224 and SEQ ID NO: 228; SEQ ID NO: 224 and SEQ ID NO: 229; SEQ ID NO: 224 and SEQ ID NO: 230; SEQ ID NO: 225 and SEQ ID NO: 226; SEQ ID NO: 225 and SEQ ID NO: 227; SEQ ID NO: 225 and SEQ ID NO: 228; SEQ ID NO: 225 and SEQ ID NO: 229; SEQ ID NO: 225 and SEQ ID NO: 230; SEQ ID NO: 226 and SEQ ID NO: 227; SEQ ID NO: 226 and SEQ ID NO: 228; SEQ ID NO: 226 and SEQ ID NO: 229; SEQ ID NO: 226 and SEQ ID NO: 230; SEQ ID NO: 227 and SEQ ID NO: 228; SEQ ID NO: 227 and SEQ ID NO: 229; SEQ ID NO: 227 and SEQ ID NO: 230; SEQ ID NO: 228 and SEQ ID NO: 229; SEQ ID NO: 228 and SEQ ID NO: 230; SEQ ID NO: 229 and SEQ ID NO: 230; SEQ ID NO: 231 and SEQ ID NO: 232; SEQ ID NO: 231 and SEQ ID NO: 233; SEQ ID NO: 231 and SEQ ID NO: 234; SEQ ID NO: 231 and SEQ ID NO: 235; SEQ ID NO: 231 and SEQ ID NO: 236; SEQ ID NO: 231 and SEQ ID NO: 237; SEQ ID NO: 231 and SEQ ID NO: 238; SEQ ID NO: 231 and SEQ ID NO: 239; SEQ ID NO: 231 and SEQ ID NO: 240; SEQ ID NO: 231 and SEQ ID NO: 241; SEQ ID NO: 231 and SEQ ID NO: 242; SEQ ID NO: 232 and SEQ ID NO: 233; SEQ ID NO: 232 and SEQ ID NO: 234; SEQ ID NO: 232 and SEQ ID NO: 235; SEQ ID NO: 232 and SEQ ID NO: 236; SEQ ID NO: 232 and SEQ ID NO: 237; SEQ ID NO: 232 and SEQ ID NO: 238; SEQ ID NO: 232 and SEQ ID NO: 239; SEQ ID NO: 232 and SEQ ID NO: 240; SEQ ID NO: 232 and SEQ ID NO: 241; SEQ ID NO: 232 and SEQ ID NO: 242; SEQ ID NO: 233 and SEQ ID NO: 234; SEQ ID NO: 233 and SEQ ID NO: 235; SEQ ID NO: 233 and SEQ ID NO: 236; SEQ ID NO: 233 and SEQ ID NO: 237; SEQ ID NO: 233 and SEQ ID NO: 238; SEQ ID NO: 233 and SEQ ID NO: 239; SEQ ID NO: 233 and SEQ ID NO: 240; SEQ ID NO: 233 and SEQ ID NO: 241; SEQ ID NO: 233 and SEQ ID NO: 242; SEQ ID NO: 234 and SEQ ID NO: 235; SEQ ID NO: 234 and SEQ ID NO: 236; SEQ ID NO: 234 and SEQ ID NO: 237; SEQ ID NO: 234 and SEQ ID NO: 238; SEQ ID NO: 234 and SEQ ID NO: 239; SEQ ID NO: 234 and SEQ ID NO: 240; SEQ ID NO: 234 and SEQ ID NO: 241; SEQ ID NO: 234 and SEQ ID NO: 242; SEQ ID NO: 235 and SEQ ID NO: 236; SEQ ID NO: 235 and SEQ ID NO: 237; SEQ ID NO: 235 and SEQ ID NO: 238; SEQ ID NO: 235 and SEQ ID NO: 239; SEQ ID NO: 235 and SEQ ID NO: 240; SEQ ID NO: 235 and SEQ ID NO: 241; SEQ ID NO: 235 and SEQ ID NO: 242; SEQ ID NO: 236 and SEQ ID NO: 237; SEQ ID NO: 236 and SEQ ID NO: 238; SEQ ID NO: 236 and SEQ ID NO: 239; SEQ ID NO: 236 and SEQ ID NO: 240; SEQ ID NO: 236 and SEQ ID NO: 241; SEQ ID NO: 236 and SEQ ID NO: 242; SEQ ID NO: 237 and SEQ ID NO: 238; SEQ ID NO: 237 and SEQ ID NO: 239; SEQ ID NO: 237 and SEQ ID NO: 240; SEQ ID NO: 237 and SEQ ID NO: 241; SEQ ID NO: 237 and SEQ ID NO: 242; SEQ ID NO: 238 and SEQ ID NO: 239; SEQ ID NO: 238 and SEQ ID NO: 240; SEQ ID NO: 238 and SEQ ID NO: 241; SEQ ID NO: 238 and SEQ ID NO: 242; SEQ ID NO: 239 and SEQ ID NO: 240; SEQ ID NO: 239 and SEQ ID NO: 241; SEQ ID NO: 239 and SEQ ID NO: 242; SEQ ID NO: 240 and SEQ ID NO: 241; SEQ ID NO: 240 and SEQ ID NO: 242; SEQ ID NO: 241 and SEQ ID NO: 242; SEQ ID NO: 243 and SEQ ID NO: 244; SEQ ID NO: 243 and SEQ ID NO: 245; SEQ ID NO: 243 and SEQ ID NO: 246; SEQ ID NO: 243 and SEQ ID NO: 247; SEQ ID NO: 243 and SEQ ID NO: 248; SEQ ID NO: 243 and SEQ ID NO: 249; SEQ ID NO: 243 and SEQ ID NO: 250; SEQ ID NO: 243 and SEQ ID NO: 251; SEQ ID NO: 243 and SEQ ID NO: 252; SEQ ID NO: 243 and SEQ ID NO: 253; SEQ ID NO: 243 and SEQ ID NO: 254; SEQ ID NO: 243 and SEQ ID NO: 255; SEQ ID NO: 243 and SEQ ID NO: 256; SEQ ID NO: 243 and SEQ ID NO: 257; SEQ ID NO: 243 and SEQ ID NO: 258; SEQ ID NO: 243 and SEQ ID NO: 259; SEQ ID NO: 243 and SEQ ID NO: 260; SEQ ID NO: 243 and SEQ ID NO: 261; SEQ ID NO: 243 and SEQ ID NO: 262; SEQ ID NO: 243 and SEQ ID NO: 263; SEQ ID NO: 243 and SEQ ID NO: 264; SEQ ID NO: 243 and SEQ ID NO: 265; SEQ ID NO: 243 and SEQ ID NO: 266; SEQ ID NO: 243 and SEQ ID NO: 267; SEQ ID NO: 243 and SEQ ID NO: 268; SEQ ID NO: 243 and SEQ ID NO: 269; SEQ ID NO: 244 and SEQ ID NO: 245; SEQ ID NO: 244 and SEQ ID NO: 246; SEQ ID NO: 244 and SEQ ID NO: 247; SEQ ID NO: 244 and SEQ ID NO: 248; SEQ ID NO: 244 and SEQ ID NO: 249; SEQ ID NO: 244 and SEQ ID NO: 250; SEQ ID NO: 244 and SEQ ID NO: 251; SEQ ID NO: 244 and SEQ ID NO: 252; SEQ ID NO: 244 and SEQ ID NO: 253; SEQ ID NO: 244 and SEQ ID NO: 254; SEQ ID NO: 244 and SEQ ID NO: 255; SEQ ID NO: 244 and SEQ ID NO: 256; SEQ ID NO: 244 and SEQ ID NO: 257; SEQ ID NO: 244 and SEQ ID NO: 258; SEQ ID NO: 244 and SEQ ID NO: 259; SEQ ID NO: 244 and SEQ ID NO: 260; SEQ ID NO: 244 and SEQ ID NO: 261; SEQ ID NO: 244 and SEQ ID NO: 262; SEQ ID NO: 244 and SEQ ID NO: 263; SEQ ID NO: 244 and SEQ ID NO: 264; SEQ ID NO: 244 and SEQ ID NO: 265; SEQ ID NO: 244 and SEQ ID NO: 266; SEQ ID NO: 244 and SEQ ID NO: 267; SEQ ID NO: 244 and SEQ ID NO: 268; SEQ ID NO: 244 and SEQ ID NO: 269; SEQ ID NO: 245 and SEQ ID NO: 246; SEQ ID NO: 245 and SEQ ID NO: 247; SEQ ID NO: 245 and SEQ ID NO: 248; SEQ ID NO: 245 and SEQ ID NO: 249; SEQ ID NO: 245 and SEQ ID NO: 250; SEQ ID NO: 245 and SEQ ID NO: 251; SEQ ID NO: 245 and SEQ ID NO: 252; SEQ ID NO: 245 and SEQ ID NO: 253; SEQ ID NO: 245 and SEQ ID NO: 254; SEQ ID NO: 245 and SEQ ID NO: 255; SEQ ID NO: 245 and SEQ ID NO: 256; SEQ ID NO: 245 and SEQ ID NO: 257; SEQ ID NO: 245 and SEQ ID NO: 258; SEQ ID NO: 245 and SEQ ID NO: 259; SEQ ID NO: 245 and SEQ ID NO: 260; SEQ ID NO: 245 and SEQ ID NO: 261; SEQ ID NO: 245 and SEQ ID NO: 262; SEQ ID NO: 245 and SEQ ID NO: 263; SEQ ID NO: 245 and SEQ ID NO: 264; SEQ ID NO: 245 and SEQ ID NO: 265; SEQ ID NO: 245 and SEQ ID NO: 266; SEQ ID NO: 245 and SEQ ID NO: 267; SEQ ID NO: 245 and SEQ ID NO: 268; SEQ ID NO: 245 and SEQ ID NO: 269; SEQ ID NO: 246 and SEQ ID NO: 247; SEQ ID NO: 246 and SEQ ID NO: 248; SEQ ID NO: 246 and SEQ ID NO: 249; SEQ ID NO: 246 and SEQ ID NO: 250; SEQ ID NO: 246 and SEQ ID NO: 251; SEQ ID NO: 246 and SEQ ID NO: 252; SEQ ID NO: 246 and SEQ ID NO: 253; SEQ ID NO: 246 and SEQ ID NO: 254; SEQ ID NO: 246 and SEQ ID NO: 255; SEQ ID NO: 246 and SEQ ID NO: 256; SEQ ID NO: 246 and SEQ ID NO: 257; SEQ ID NO: 246 and SEQ ID NO: 258; SEQ ID NO: 246 and SEQ ID NO: 259; SEQ ID NO: 246 and SEQ ID NO: 260; SEQ ID NO: 246 and SEQ ID NO: 261; SEQ ID NO: 246 and SEQ ID NO: 262; SEQ ID NO: 246 and SEQ ID NO: 263; SEQ ID NO: 246 and SEQ ID NO: 264; SEQ ID NO: 246 and SEQ ID NO: 265; SEQ ID NO: 246 and SEQ ID NO: 266; SEQ ID NO: 246 and SEQ ID NO: 267; SEQ ID NO: 246 and SEQ ID NO: 268; SEQ ID NO: 246 and SEQ ID NO: 269; SEQ ID NO: 247 and SEQ ID NO: 248; SEQ ID NO: 247 and SEQ ID NO: 249; SEQ ID NO: 247 and SEQ ID NO: 250; SEQ ID NO: 247 and SEQ ID NO: 251; SEQ ID NO: 247 and SEQ ID NO: 252; SEQ ID NO: 247 and SEQ ID NO: 253; SEQ ID NO: 247 and SEQ ID NO: 254; SEQ ID NO: 247 and SEQ ID NO: 255; SEQ ID NO: 247 and SEQ ID NO: 256; SEQ ID NO: 247 and SEQ ID NO: 257; SEQ ID NO: 247 and SEQ ID NO: 258; SEQ ID NO: 247 and SEQ ID NO: 259; SEQ ID NO: 247 and SEQ ID NO: 260; SEQ ID NO: 247 and SEQ ID NO: 261; SEQ ID NO: 247 and SEQ ID NO: 262; SEQ ID NO: 247 and SEQ ID NO: 263; SEQ ID NO: 247 and SEQ ID NO: 264; SEQ ID NO: 247 and SEQ ID NO: 265; SEQ ID NO: 247 and SEQ ID NO: 266; SEQ ID NO: 247 and SEQ ID NO: 267; SEQ ID NO: 247 and SEQ ID NO: 268; SEQ ID NO: 247 and SEQ ID NO: 269; SEQ ID NO: 248 and SEQ ID NO: 249; SEQ ID NO: 248 and SEQ ID NO: 250; SEQ ID NO: 248 and SEQ ID NO: 251; SEQ ID NO: 248 and SEQ ID NO: 252; SEQ ID NO: 248 and SEQ ID NO: 253; SEQ ID NO: 248 and SEQ ID NO: 254; SEQ ID NO: 248 and SEQ ID NO: 255; SEQ ID NO: 248 and SEQ ID NO: 256; SEQ ID NO: 248 and SEQ ID NO: 257; SEQ ID NO: 248 and SEQ ID NO: 258; SEQ ID NO: 248 and SEQ ID NO: 259; SEQ ID NO: 248 and SEQ ID NO: 260; SEQ ID NO: 248 and SEQ ID NO: 261; SEQ ID NO: 248 and SEQ ID NO: 262; SEQ ID NO: 248 and SEQ ID NO: 263; SEQ ID NO: 248 and SEQ ID NO: 264; SEQ ID NO: 248 and SEQ ID NO: 265; SEQ ID NO: 248 and SEQ ID NO: 266; SEQ ID NO: 248 and SEQ ID NO: 267; SEQ ID NO: 248 and SEQ ID NO: 268; SEQ ID NO: 248 and SEQ ID NO: 269; SEQ ID NO: 249 and SEQ ID NO: 250; SEQ ID NO: 249 and SEQ ID NO: 251; SEQ ID NO: 249 and SEQ ID NO: 252; SEQ ID NO: 249 and SEQ ID NO: 253; SEQ ID NO: 249 and SEQ ID NO: 254; SEQ ID NO: 249 and SEQ ID NO: 255; SEQ ID NO: 249 and SEQ ID NO: 256; SEQ ID NO: 249 and SEQ ID NO: 257; SEQ ID NO: 249 and SEQ ID NO: 258; SEQ ID NO: 249 and SEQ ID NO: 259; SEQ ID NO: 249 and SEQ ID NO: 260; SEQ ID NO: 249 and SEQ ID NO: 261; SEQ ID NO: 249 and SEQ ID NO: 262; SEQ ID NO: 249 and SEQ ID NO: 263; SEQ ID NO: 249 and SEQ ID NO: 264; SEQ ID NO: 249 and SEQ ID NO: 265; SEQ ID NO: 249 and SEQ ID NO: 266; SEQ ID NO: 249 and SEQ ID NO: 267; SEQ ID NO: 249 and SEQ ID NO: 268; SEQ ID NO: 249 and SEQ ID NO: 269; SEQ ID NO: 250 and SEQ ID NO: 251; SEQ ID NO: 250 and SEQ ID NO: 252; SEQ ID NO: 250 and SEQ ID NO: 253; SEQ ID NO: 250 and SEQ ID NO: 254; SEQ ID NO: 250 and SEQ ID NO: 255; SEQ ID NO: 250 and SEQ ID NO: 256; SEQ ID NO: 250 and SEQ ID NO: 257; SEQ ID NO: 250 and SEQ ID NO: 258; SEQ ID NO: 250 and SEQ ID NO: 259; SEQ ID NO: 250 and SEQ ID NO: 260; SEQ ID NO: 250 and SEQ ID NO: 261; SEQ ID NO: 250 and SEQ ID NO: 262; SEQ ID NO: 250 and SEQ ID NO: 263; SEQ ID NO: 250 and SEQ ID NO: 264; SEQ ID NO: 250 and SEQ ID NO: 265; SEQ ID NO: 250 and SEQ ID NO: 266; SEQ ID NO: 250 and SEQ ID NO: 267; SEQ ID NO: 250 and SEQ ID NO: 268; SEQ ID NO: 250 and SEQ ID NO: 269; SEQ ID NO: 251 and SEQ ID NO: 252; SEQ ID NO: 251 and SEQ ID NO: 253; SEQ ID NO: 251 and SEQ ID NO: 254; SEQ ID NO: 251 and SEQ ID NO: 255; SEQ ID NO: 251 and SEQ ID NO: 256; SEQ ID NO: 251 and SEQ ID NO: 257; SEQ ID NO: 251 and SEQ ID NO: 258; SEQ ID NO: 251 and SEQ ID NO: 259; SEQ ID NO: 251 and SEQ ID NO: 260; SEQ ID NO: 251 and SEQ ID NO: 261; SEQ ID NO: 251 and SEQ ID NO: 262; SEQ ID NO: 251 and SEQ ID NO: 263; SEQ ID NO: 251 and SEQ ID NO: 264; SEQ ID NO: 251 and SEQ ID NO: 265; SEQ ID NO: 251 and SEQ ID NO: 266; SEQ ID NO: 251 and SEQ ID NO: 267; SEQ ID NO: 251 and SEQ ID NO: 268; SEQ ID NO: 251 and SEQ ID NO: 269; SEQ ID NO: 252 and SEQ ID NO: 253; SEQ ID NO: 252 and SEQ ID NO: 254; SEQ ID NO: 252 and SEQ ID NO: 255; SEQ ID NO: 252 and SEQ ID NO: 256; SEQ ID NO: 252 and SEQ ID NO: 257; SEQ ID NO: 252 and SEQ ID NO: 258; SEQ ID NO: 252 and SEQ ID NO: 259; SEQ ID NO: 252 and SEQ ID NO: 260; SEQ ID NO: 252 and SEQ ID NO: 261; SEQ ID NO: 252 and SEQ ID NO: 262; SEQ ID NO: 252 and SEQ ID NO: 263; SEQ ID NO: 252 and SEQ ID NO: 264; SEQ ID NO: 252 and SEQ ID NO: 265; SEQ ID NO: 252 and SEQ ID NO: 266; SEQ ID NO: 252 and SEQ ID NO: 267; SEQ ID NO: 252 and SEQ ID NO: 268; SEQ ID NO: 252 and SEQ ID NO: 269; SEQ ID NO: 253 and SEQ ID NO: 254; SEQ ID NO: 253 and SEQ ID NO: 255; SEQ ID NO: 253 and SEQ ID NO: 256; SEQ ID NO: 253 and SEQ ID NO: 257; SEQ ID NO: 253 and SEQ ID NO: 258; SEQ ID NO: 253 and SEQ ID NO: 259; SEQ ID NO: 253 and SEQ ID NO: 260; SEQ ID NO: 253 and SEQ ID NO: 261; SEQ ID NO: 253 and SEQ ID NO: 262; SEQ ID NO: 253 and SEQ ID NO: 263; SEQ ID NO: 253 and SEQ ID NO: 264; SEQ ID NO: 253 and SEQ ID NO: 265; SEQ ID NO: 253 and SEQ ID NO: 266; SEQ ID NO: 253 and SEQ ID NO: 267; SEQ ID NO: 253 and SEQ ID NO: 268; SEQ ID NO: 253 and SEQ ID NO: 269; SEQ ID NO: 254 and SEQ ID NO: 255; SEQ ID NO: 254 and SEQ ID NO: 256; SEQ ID NO: 254 and SEQ ID NO: 257; SEQ ID NO: 254 and SEQ ID NO: 258; SEQ ID NO: 254 and SEQ ID NO: 259; SEQ ID NO: 254 and SEQ ID NO: 260; SEQ ID NO: 254 and SEQ ID NO: 261; SEQ ID NO: 254 and SEQ ID NO: 262; SEQ ID NO: 254 and SEQ ID NO: 263; SEQ ID NO: 254 and SEQ ID NO: 264; SEQ ID NO: 254 and SEQ ID NO: 265; SEQ ID NO: 254 and SEQ ID NO: 266; SEQ ID NO: 254 and SEQ ID NO: 267; SEQ ID NO: 254 and SEQ ID NO: 268; SEQ ID NO: 254 and SEQ ID NO: 269; SEQ ID NO: 255 and SEQ ID NO: 256; SEQ ID NO: 255 and SEQ ID NO: 257; SEQ ID NO: 255 and SEQ ID NO: 258; SEQ ID NO: 255 and SEQ ID NO: 259; SEQ ID NO: 255 and SEQ ID NO: 260; SEQ ID NO: 255 and SEQ ID NO: 261; SEQ ID NO: 255 and SEQ ID NO: 262; SEQ ID NO: 255 and SEQ ID NO: 263; SEQ ID NO: 255 and SEQ ID NO: 264; SEQ ID NO: 255 and SEQ ID NO: 265; SEQ ID NO: 255 and SEQ ID NO: 266; SEQ ID NO: 255 and SEQ ID NO: 267; SEQ ID NO: 255 and SEQ ID NO: 268; SEQ ID NO: 255 and SEQ ID NO: 269; SEQ ID NO: 256 and SEQ ID NO: 257; SEQ ID NO: 256 and SEQ ID NO: 258; SEQ ID NO: 256 and SEQ ID NO: 259; SEQ ID NO: 256 and SEQ ID NO: 260; SEQ ID NO: 256 and SEQ ID NO: 261; SEQ ID NO: 256 and SEQ ID NO: 262; SEQ ID NO: 256 and SEQ ID NO: 263; SEQ ID NO: 256 and SEQ ID NO: 264; SEQ ID NO: 256 and SEQ ID NO: 265; SEQ ID NO: 256 and SEQ ID NO: 266; SEQ ID NO: 256 and SEQ ID NO: 267; SEQ ID NO: 256 and SEQ ID NO: 268; SEQ ID NO: 256 and SEQ ID NO: 269; SEQ ID NO: 257 and SEQ ID NO: 258; SEQ ID NO: 257 and SEQ ID NO: 259; SEQ ID NO: 257 and SEQ ID NO: 260; SEQ ID NO: 257 and SEQ ID NO: 261; SEQ ID NO: 257 and SEQ ID NO: 262; SEQ ID NO: 257 and SEQ ID NO: 263; SEQ ID NO: 257 and SEQ ID NO: 264; SEQ ID NO: 257 and SEQ ID NO: 265; SEQ ID NO: 257 and SEQ ID NO: 266; SEQ ID NO: 257 and SEQ ID NO: 267; SEQ ID NO: 257 and SEQ ID NO: 268; SEQ ID NO: 257 and SEQ ID NO: 269; SEQ ID NO: 258 and SEQ ID NO: 259; SEQ ID NO: 258 and SEQ ID NO: 260; SEQ ID NO: 258 and SEQ ID NO: 261; SEQ ID NO: 258 and SEQ ID NO: 262; SEQ ID NO: 258 and SEQ ID NO: 263; SEQ ID NO: 258 and SEQ ID NO: 264; SEQ ID NO: 258 and SEQ ID NO: 265; SEQ ID NO: 258 and SEQ ID NO: 266; SEQ ID NO: 258 and SEQ ID NO: 267; SEQ ID NO: 258 and SEQ ID NO: 268; SEQ ID NO: 258 and SEQ ID NO: 269; SEQ ID NO: 259 and SEQ ID NO: 260; SEQ ID NO: 259 and SEQ ID NO: 261; SEQ ID NO: 259 and SEQ ID NO: 262; SEQ ID NO: 259 and SEQ ID NO: 263; SEQ ID NO: 259 and SEQ ID NO: 264; SEQ ID NO: 259 and SEQ ID NO: 265; SEQ ID NO: 259 and SEQ ID NO: 266; SEQ ID NO: 259 and SEQ ID NO: 267; SEQ ID NO: 259 and SEQ ID NO: 268; SEQ ID NO: 259 and SEQ ID NO: 269; SEQ ID NO: 260 and SEQ ID NO: 261; SEQ ID NO: 260 and SEQ ID NO: 262; SEQ ID NO: 260 and SEQ ID NO: 263; SEQ ID NO: 260 and SEQ ID NO: 264; SEQ ID NO: 260 and SEQ ID NO: 265; SEQ ID NO: 260 and SEQ ID NO: 266; SEQ ID NO: 260 and SEQ ID NO: 267; SEQ ID NO: 260 and SEQ ID NO: 268; SEQ ID NO: 260 and SEQ ID NO: 269; SEQ ID NO: 261 and SEQ ID NO: 262; SEQ ID NO: 261 and SEQ ID NO: 263; SEQ ID NO: 261 and SEQ ID NO: 264; SEQ ID NO: 261 and SEQ ID NO: 265; SEQ ID NO: 261 and SEQ ID NO: 266; SEQ ID NO: 261 and SEQ ID NO: 267; SEQ ID NO: 261 and SEQ ID NO: 268; SEQ ID NO: 261 and SEQ ID NO: 269; SEQ ID NO: 262 and SEQ ID NO: 263; SEQ ID NO: 262 and SEQ ID NO: 264; SEQ ID NO: 262 and SEQ ID NO: 265; SEQ ID NO: 262 and SEQ ID NO: 266; SEQ ID NO: 262 and SEQ ID NO: 267; SEQ ID NO: 262 and SEQ ID NO: 268; SEQ ID NO: 262 and SEQ ID NO: 269; SEQ ID NO: 263 and SEQ ID NO: 264; SEQ ID NO: 263 and SEQ ID NO: 265; SEQ ID NO: 263 and SEQ ID NO: 266; SEQ ID NO: 263 and SEQ ID NO: 267; SEQ ID NO: 263 and SEQ ID NO: 268; SEQ ID NO: 263 and SEQ ID NO: 269; SEQ ID NO: 264 and SEQ ID NO: 265; SEQ ID NO: 264 and SEQ ID NO: 266; SEQ ID NO: 264 and SEQ ID NO: 267; SEQ ID NO: 264 and SEQ ID NO: 268; SEQ ID NO: 264 and SEQ ID NO: 269; SEQ ID NO: 265 and SEQ ID NO: 266; SEQ ID NO: 265 and SEQ ID NO: 267; SEQ ID NO: 265 and SEQ ID NO: 268; SEQ ID NO: 265 and SEQ ID NO: 269; SEQ ID NO: 266 and SEQ ID NO: 267; SEQ ID NO: 266 and SEQ ID NO: 268; SEQ ID NO: 266 and SEQ ID NO: 269; SEQ ID NO: 267 and SEQ ID NO: 268; SEQ ID NO: 267 and SEQ ID NO: 269; SEQ ID NO: 268 and SEQ ID NO: 269; SEQ ID NO: 270 and SEQ ID NO: 271; SEQ ID NO: 270 and SEQ ID NO: 272; SEQ ID NO: 270 and SEQ ID NO: 273; SEQ ID NO: 270 and SEQ ID NO: 274; SEQ ID NO: 270 and SEQ ID NO: 275; SEQ ID NO: 270 and SEQ ID NO: 276; SEQ ID NO: 270 and SEQ ID NO: 277; SEQ ID NO: 270 and SEQ ID NO: 278; SEQ ID NO: 270 and SEQ ID NO: 279; SEQ ID NO: 270 and SEQ ID NO: 280; SEQ ID NO: 270 and SEQ ID NO: 281; SEQ ID NO: 270 and SEQ ID NO: 282; SEQ ID NO: 270 and SEQ ID NO: 283; SEQ ID NO: 270 and SEQ ID NO: 284; SEQ ID NO: 270 and SEQ ID NO: 285; SEQ ID NO: 270 and SEQ ID NO: 286; SEQ ID NO: 270 and SEQ ID NO: 287; SEQ ID NO: 270 and SEQ ID NO: 288; SEQ ID NO: 270 and SEQ ID NO: 289; SEQ ID NO: 270 and SEQ ID NO: 290; SEQ ID NO: 270 and SEQ ID NO: 291; SEQ ID NO: 270 and SEQ ID NO: 292; SEQ ID NO: 271 and SEQ ID NO: 272; SEQ ID NO: 271 and SEQ ID NO: 273; SEQ ID NO: 271 and SEQ ID NO: 274; SEQ ID NO: 271 and SEQ ID NO: 275; SEQ ID NO: 271 and SEQ ID NO: 276; SEQ ID NO: 271 and SEQ ID NO: 277; SEQ ID NO: 271 and SEQ ID NO: 278; SEQ ID NO: 271 and SEQ ID NO: 279; SEQ ID NO: 271 and SEQ ID NO: 280; SEQ ID NO: 271 and SEQ ID NO: 281; SEQ ID NO: 271 and SEQ ID NO: 282; SEQ ID NO: 271 and SEQ ID NO: 283; SEQ ID NO: 271 and SEQ ID NO: 284; SEQ ID NO: 271 and SEQ ID NO: 285; SEQ ID NO: 271 and SEQ ID NO: 286; SEQ ID NO: 271 and SEQ ID NO: 287; SEQ ID NO: 271 and SEQ ID NO: 288; SEQ ID NO: 271 and SEQ ID NO: 289; SEQ ID NO: 271 and SEQ ID NO: 290; SEQ ID NO: 271 and SEQ ID NO: 291; SEQ ID NO: 271 and SEQ ID NO: 292; SEQ ID NO: 272 and SEQ ID NO: 273; SEQ ID NO: 272 and SEQ ID NO: 274; SEQ ID NO: 272 and SEQ ID NO: 275; SEQ ID NO: 272 and SEQ ID NO: 276; SEQ ID NO: 272 and SEQ ID NO: 277; SEQ ID NO: 272 and SEQ ID NO: 278; SEQ ID NO: 272 and SEQ ID NO: 279; SEQ ID NO: 272 and SEQ ID NO: 280; SEQ ID NO: 272 and SEQ ID NO: 281; SEQ ID NO: 272 and SEQ ID NO: 282; SEQ ID NO: 272 and SEQ ID NO: 283; SEQ ID NO: 272 and SEQ ID NO: 284; SEQ ID NO: 272 and SEQ ID NO: 285; SEQ ID NO: 272 and SEQ ID NO: 286; SEQ ID NO: 272 and SEQ ID NO: 287; SEQ ID NO: 272 and SEQ ID NO: 288; SEQ ID NO: 272 and SEQ ID NO: 289; SEQ ID NO: 272 and SEQ ID NO: 290; SEQ ID NO: 272 and SEQ ID NO: 291; SEQ ID NO: 272 and SEQ ID NO: 292; SEQ ID NO: 273 and SEQ ID NO: 274; SEQ ID NO: 273 and SEQ ID NO: 275; SEQ ID NO: 273 and SEQ ID NO: 276; SEQ ID NO: 273 and SEQ ID NO: 277; SEQ ID NO: 273 and SEQ ID NO: 278; SEQ ID NO: 273 and SEQ ID NO: 279; SEQ ID NO: 273 and SEQ ID NO: 280; SEQ ID NO: 273 and SEQ ID NO: 281; SEQ ID NO: 273 and SEQ ID NO: 282; SEQ ID NO: 273 and SEQ ID NO: 283; SEQ ID NO: 273 and SEQ ID NO: 284; SEQ ID NO: 273 and SEQ ID NO: 285; SEQ ID NO: 273 and SEQ ID NO: 286; SEQ ID NO: 273 and SEQ ID NO: 287; SEQ ID NO: 273 and SEQ ID NO: 288; SEQ ID NO: 273 and SEQ ID NO: 289; SEQ ID NO: 273 and SEQ ID NO: 290; SEQ ID NO: 273 and SEQ ID NO: 291; SEQ ID NO: 273 and SEQ ID NO: 292; SEQ ID NO: 274 and SEQ ID NO: 275; SEQ ID NO: 274 and SEQ ID NO: 276; SEQ ID NO: 274 and SEQ ID NO: 277; SEQ ID NO: 274 and SEQ ID NO: 278; SEQ ID NO: 274 and SEQ ID NO: 279; SEQ ID NO: 274 and SEQ ID NO: 280; SEQ ID NO: 274 and SEQ ID NO: 281; SEQ ID NO: 274 and SEQ ID NO: 282; SEQ ID NO: 274 and SEQ ID NO: 283; SEQ ID NO: 274 and SEQ ID NO: 284; SEQ ID NO: 274 and SEQ ID NO: 285; SEQ ID NO: 274 and SEQ ID NO: 286; SEQ ID NO: 274 and SEQ ID NO: 287; SEQ ID NO: 274 and SEQ ID NO: 288; SEQ ID NO: 274 and SEQ ID NO: 289; SEQ ID NO: 274 and SEQ ID NO: 290; SEQ ID NO: 274 and SEQ ID NO: 291; SEQ ID NO: 274 and SEQ ID NO: 292; SEQ ID NO: 275 and SEQ ID NO: 276; SEQ ID NO: 275 and SEQ ID NO: 277; SEQ ID NO: 275 and SEQ ID NO: 278; SEQ ID NO: 275 and SEQ ID NO: 279; SEQ ID NO: 275 and SEQ ID NO: 280; SEQ ID NO: 275 and SEQ ID NO: 281; SEQ ID NO: 275 and SEQ ID NO: 282; SEQ ID NO: 275 and SEQ ID NO: 283; SEQ ID NO: 275 and SEQ ID NO: 284; SEQ ID NO: 275 and SEQ ID NO: 285; SEQ ID NO: 275 and SEQ ID NO: 286; SEQ ID NO: 275 and SEQ ID NO: 287; SEQ ID NO: 275 and SEQ ID NO: 288; SEQ ID NO: 275 and SEQ ID NO: 289; SEQ ID NO: 275 and SEQ ID NO: 290; SEQ ID NO: 275 and SEQ ID NO: 291; SEQ ID NO: 275 and SEQ ID NO: 292; SEQ ID NO: 276 and SEQ ID NO: 277; SEQ ID NO: 276 and SEQ ID NO: 278; SEQ ID NO: 276 and SEQ ID NO: 279; SEQ ID NO: 276 and SEQ ID NO: 280; SEQ ID NO: 276 and SEQ ID NO: 281; SEQ ID NO: 276 and SEQ ID NO: 282; SEQ ID NO: 276 and SEQ ID NO: 283; SEQ ID NO: 276 and SEQ ID NO: 284; SEQ ID NO: 276 and SEQ ID NO: 285; SEQ ID NO: 276 and SEQ ID NO: 286; SEQ ID NO: 276 and SEQ ID NO: 287; SEQ ID NO: 276 and SEQ ID NO: 288; SEQ ID NO: 276 and SEQ ID NO: 289; SEQ ID NO: 276 and SEQ ID NO: 290; SEQ ID NO: 276 and SEQ ID NO: 291; SEQ ID NO: 276 and SEQ ID NO: 292; SEQ ID NO: 277 and SEQ ID NO: 278; SEQ ID NO: 277 and SEQ ID NO: 279; SEQ ID NO: 277 and SEQ ID NO: 280; SEQ ID NO: 277 and SEQ ID NO: 281; SEQ ID NO: 277 and SEQ ID NO: 282; SEQ ID NO: 277 and SEQ ID NO: 283; SEQ ID NO: 277 and SEQ ID NO: 284; SEQ ID NO: 277 and SEQ ID NO: 285; SEQ ID NO: 277 and SEQ ID NO: 286; SEQ ID NO: 277 and SEQ ID NO: 287; SEQ ID NO: 277 and SEQ ID NO: 288; SEQ ID NO: 277 and SEQ ID NO: 289; SEQ ID NO: 277 and SEQ ID NO: 290; SEQ ID NO: 277 and SEQ ID NO: 291; SEQ ID NO: 277 and SEQ ID NO: 292; SEQ ID NO: 278 and SEQ ID NO: 279; SEQ ID NO: 278 and SEQ ID NO: 280; SEQ ID NO: 278 and SEQ ID NO: 281; SEQ ID NO: 278 and SEQ ID NO: 282; SEQ ID NO: 278 and SEQ ID NO: 283; SEQ ID NO: 278 and SEQ ID NO: 284; SEQ ID NO: 278 and SEQ ID NO: 285; SEQ ID NO: 278 and SEQ ID NO: 286; SEQ ID NO: 278 and SEQ ID NO: 287; SEQ ID NO: 278 and SEQ ID NO: 288; SEQ ID NO: 278 and SEQ ID NO: 289; SEQ ID NO: 278 and SEQ ID NO: 290; SEQ ID NO: 278 and SEQ ID NO: 291; SEQ ID NO: 278 and SEQ ID NO: 292; SEQ ID NO: 279 and SEQ ID NO: 280; SEQ ID NO: 279 and SEQ ID NO: 281; SEQ ID NO: 279 and SEQ ID NO: 282; SEQ ID NO: 279 and SEQ ID NO: 283; SEQ ID NO: 279 and SEQ ID NO: 284; SEQ ID NO: 279 and SEQ ID NO: 285; SEQ ID NO: 279 and SEQ ID NO: 286; SEQ ID NO: 279 and SEQ ID NO: 287; SEQ ID NO: 279 and SEQ ID NO: 288; SEQ ID NO: 279 and SEQ ID NO: 289; SEQ ID NO: 279 and SEQ ID NO: 290; SEQ ID NO: 279 and SEQ ID NO: 291; SEQ ID NO: 279 and SEQ ID NO: 292; SEQ ID NO: 280 and SEQ ID NO: 281; SEQ ID NO: 280 and SEQ ID NO: 282; SEQ ID NO: 280 and SEQ ID NO: 283; SEQ ID NO: 280 and SEQ ID NO: 284; SEQ ID NO: 280 and SEQ ID NO: 285; SEQ ID NO: 280 and SEQ ID NO: 286; SEQ ID NO: 280 and SEQ ID NO: 287; SEQ ID NO: 280 and SEQ ID NO: 288; SEQ ID NO: 280 and SEQ ID NO: 289; SEQ ID NO: 280 and SEQ ID NO: 290; SEQ ID NO: 280 and SEQ ID NO: 291; SEQ ID NO: 280 and SEQ ID NO: 292; SEQ ID NO: 281 and SEQ ID NO: 282; SEQ ID NO: 281 and SEQ ID NO: 283; SEQ ID NO: 281 and SEQ ID NO: 284; SEQ ID NO: 281 and SEQ ID NO: 285; SEQ ID NO: 281 and SEQ ID NO: 286; SEQ ID NO: 281 and SEQ ID NO: 287; SEQ ID NO: 281 and SEQ ID NO: 288; SEQ ID NO: 281 and SEQ ID NO: 289; SEQ ID NO: 281 and SEQ ID NO: 290; SEQ ID NO: 281 and SEQ ID NO: 291; SEQ ID NO: 281 and SEQ ID NO: 292; SEQ ID NO: 282 and SEQ ID NO: 283; SEQ ID NO: 282 and SEQ ID NO: 284; SEQ ID NO: 282 and SEQ ID NO: 285; SEQ ID NO: 282 and SEQ ID NO: 286; SEQ ID NO: 282 and SEQ ID NO: 287; SEQ ID NO: 282 and SEQ ID NO: 288; SEQ ID NO: 282 and SEQ ID NO: 289; SEQ ID NO: 282 and SEQ ID NO: 290; SEQ ID NO: 282 and SEQ ID NO: 291; SEQ ID NO: 282 and SEQ ID NO: 292; SEQ ID NO: 283 and SEQ ID NO: 284; SEQ ID NO: 283 and SEQ ID NO: 285; SEQ ID NO: 283 and SEQ ID NO: 286; SEQ ID NO: 283 and SEQ ID NO: 287; SEQ ID NO: 283 and SEQ ID NO: 288; SEQ ID NO: 283 and SEQ ID NO: 289; SEQ ID NO: 283 and SEQ ID NO: 290; SEQ ID NO: 283 and SEQ ID NO: 291; SEQ ID NO: 283 and SEQ ID NO: 292; SEQ ID NO: 284 and SEQ ID NO: 285; SEQ ID NO: 284 and SEQ ID NO: 286; SEQ ID NO: 284 and SEQ ID NO: 287; SEQ ID NO: 284 and SEQ ID NO: 288; SEQ ID NO: 284 and SEQ ID NO: 289; SEQ ID NO: 284 and SEQ ID NO: 290; SEQ ID NO: 284 and SEQ ID NO: 291; SEQ ID NO: 284 and SEQ ID NO: 292; SEQ ID NO: 285 and SEQ ID NO: 286; SEQ ID NO: 285 and SEQ ID NO: 287; SEQ ID NO: 285 and SEQ ID NO: 288; SEQ ID NO: 285 and SEQ ID NO: 289; SEQ ID NO: 285 and SEQ ID NO: 290; SEQ ID NO: 285 and SEQ ID NO: 291; SEQ ID NO: 285 and SEQ ID NO: 292; SEQ ID NO: 286 and SEQ ID NO: 287; SEQ ID NO: 286 and SEQ ID NO: 288; SEQ ID NO: 286 and SEQ ID NO: 289; SEQ ID NO: 286 and SEQ ID NO: 290; SEQ ID NO: 286 and SEQ ID NO: 291; SEQ ID NO: 286 and SEQ ID NO: 292; SEQ ID NO: 287 and SEQ ID NO: 288; SEQ ID NO: 287 and SEQ ID NO: 289; SEQ ID NO: 287 and SEQ ID NO: 290; SEQ ID NO: 287 and SEQ ID NO: 291; SEQ ID NO: 287 and SEQ ID NO: 292; SEQ ID NO: 288 and SEQ ID NO: 289; SEQ ID NO: 288 and SEQ ID NO: 290; SEQ ID NO: 288 and SEQ ID NO: 291; SEQ ID NO: 288 and SEQ ID NO: 292; SEQ ID NO: 289 and SEQ ID NO: 290; SEQ ID NO: 289 and SEQ ID NO: 291; SEQ ID NO: 289 and SEQ ID NO: 292; SEQ ID NO: 290 and SEQ ID NO: 291; SEQ ID NO: 290 and SEQ ID NO: 292; SEQ ID NO: 291 and SEQ ID NO: 292; SEQ ID NO: 270 and SEQ ID NO: 924; SEQ ID NO: 270 and SEQ ID NO: 925; SEQ ID NO: 270 and SEQ ID NO: 926; SEQ ID NO: 270 and SEQ ID NO: 927; SEQ ID NO: 270 and SEQ ID NO: 928; SEQ ID NO: 270 and SEQ ID NO: 929; SEQ ID NO: 270 and SEQ ID NO: 930; SEQ ID NO: 270 and SEQ ID NO: 931; SEQ ID NO: 270 and SEQ ID NO: 932; SEQ ID NO: 270 and SEQ ID NO: 933; SEQ ID NO: 270 and SEQ ID NO: 934; SEQ ID NO: 270 and SEQ ID NO: 935; SEQ ID NO: 270 and SEQ ID NO: 936; SEQ ID NO: 270 and SEQ ID NO: 937; SEQ ID NO: 270 and SEQ ID NO: 938; SEQ ID NO: 272 and SEQ ID NO: 924; SEQ ID NO: 272 and SEQ ID NO: 925; SEQ ID NO: 272 and SEQ ID NO: 926; SEQ ID NO: 272 and SEQ ID NO: 927; SEQ ID NO: 272 and SEQ ID NO: 928; SEQ ID NO: 272 and SEQ ID NO: 929; SEQ ID NO: 272 and SEQ ID NO: 930; SEQ ID NO: 272 and SEQ ID NO: 931; SEQ ID NO: 272 and SEQ ID NO: 932; SEQ ID NO: 272 and SEQ ID NO: 933; SEQ ID NO: 272 and SEQ ID NO: 934; SEQ ID NO: 272 and SEQ ID NO: 935; SEQ ID NO: 272 and SEQ ID NO: 936; SEQ ID NO: 272 and SEQ ID NO: 937; SEQ ID NO: 272 and SEQ ID NO: 938; SEQ ID NO: 273 and SEQ ID NO: 924; SEQ ID NO: 273 and SEQ ID NO: 925; SEQ ID NO: 273 and SEQ ID NO: 926; SEQ ID NO: 273 and SEQ ID NO: 927; SEQ ID NO: 273 and SEQ ID NO: 928; SEQ ID NO: 273 and SEQ ID NO: 929; SEQ ID NO: 273 and SEQ ID NO: 930; SEQ ID NO: 273 and SEQ ID NO: 931; SEQ ID NO: 273 and SEQ ID NO: 932; SEQ ID NO: 273 and SEQ ID NO: 933; SEQ ID NO: 273 and SEQ ID NO: 934; SEQ ID NO: 273 and SEQ ID NO: 935; SEQ ID NO: 273 and SEQ ID NO: 936; SEQ ID NO: 273 and SEQ ID NO: 937; SEQ ID NO: 273 and SEQ ID NO: 938; SEQ ID NO: 274 and SEQ ID NO: 924; SEQ ID NO: 274 and SEQ ID NO: 925; SEQ ID NO: 274 and SEQ ID NO: 926; SEQ ID NO: 274 and SEQ ID NO: 927; SEQ ID NO: 274 and SEQ ID NO: 928; SEQ ID NO: 274 and SEQ ID NO: 929; SEQ ID NO: 274 and SEQ ID NO: 930; SEQ ID NO: 274 and SEQ ID NO: 931; SEQ ID NO: 274 and SEQ ID NO: 932; SEQ ID NO: 274 and SEQ ID NO: 933; SEQ ID NO: 274 and SEQ ID NO: 934; SEQ ID NO: 274 and SEQ ID NO: 935; SEQ ID NO: 274 and SEQ ID NO: 936; SEQ ID NO: 274 and SEQ ID NO: 937; SEQ ID NO: 274 and SEQ ID NO: 938; SEQ ID NO: 275 and SEQ ID NO: 924; SEQ ID NO: 275 and SEQ ID NO: 925; SEQ ID NO: 275 and SEQ ID NO: 926; SEQ ID NO: 275 and SEQ ID NO: 927; SEQ ID NO: 275 and SEQ ID NO: 928; SEQ ID NO: 275 and SEQ ID NO: 929; SEQ ID NO: 275 and SEQ ID NO: 930; SEQ ID NO: 275 and SEQ ID NO: 931; SEQ ID NO: 275 and SEQ ID NO: 932; SEQ ID NO: 275 and SEQ ID NO: 933; SEQ ID NO: 275 and SEQ ID NO: 934; SEQ ID NO: 275 and SEQ ID NO: 935; SEQ ID NO: 275 and SEQ ID NO: 936; SEQ ID NO: 275 and SEQ ID NO: 937; SEQ ID NO: 275 and SEQ ID NO: 938; SEQ ID NO: 276 and SEQ ID NO: 924; SEQ ID NO: 276 and SEQ ID NO: 925; SEQ ID NO: 276 and SEQ ID NO: 926; SEQ ID NO: 276 and SEQ ID NO: 927; SEQ ID NO: 276 and SEQ ID NO: 928; SEQ ID NO: 276 and SEQ ID NO: 929; SEQ ID NO: 276 and SEQ ID NO: 930; SEQ ID NO: 276 and SEQ ID NO: 931; SEQ ID NO: 276 and SEQ ID NO: 932; SEQ ID NO: 276 and SEQ ID NO: 933; SEQ ID NO: 276 and SEQ ID NO: 934; SEQ ID NO: 276 and SEQ ID NO: 935; SEQ ID NO: 276 and SEQ ID NO: 936; SEQ ID NO: 276 and SEQ ID NO: 937; SEQ ID NO: 276 and SEQ ID NO: 938; SEQ ID NO: 277 and SEQ ID NO: 924; SEQ ID NO: 277 and SEQ ID NO: 925; SEQ ID NO: 277 and SEQ ID NO: 926; SEQ ID NO: 277 and SEQ ID NO: 927; SEQ ID NO: 277 and SEQ ID NO: 928; SEQ ID NO: 277 and SEQ ID NO: 929; SEQ ID NO: 277 and SEQ ID NO: 930; SEQ ID NO: 277 and SEQ ID NO: 931; SEQ ID NO: 277 and SEQ ID NO: 932; SEQ ID NO: 277 and SEQ ID NO: 933; SEQ ID NO: 277 and SEQ ID NO: 934; SEQ ID NO: 277 and SEQ ID NO: 935; SEQ ID NO: 277 and SEQ ID NO: 936; SEQ ID NO: 277 and SEQ ID NO: 937; SEQ ID NO: 277 and SEQ ID NO: 938; SEQ ID NO: 278 and SEQ ID NO: 924; SEQ ID NO: 278 and SEQ ID NO: 925; SEQ ID NO: 278 and SEQ ID NO: 926; SEQ ID NO: 278 and SEQ ID NO: 927; SEQ ID NO: 278 and SEQ ID NO: 928; SEQ ID NO: 278 and SEQ ID NO: 929; SEQ ID NO: 278 and SEQ ID NO: 930; SEQ ID NO: 278 and SEQ ID NO: 931; SEQ ID NO: 278 and SEQ ID NO: 932; SEQ ID NO: 278 and SEQ ID NO: 933; SEQ ID NO: 278 and SEQ ID NO: 934; SEQ ID NO: 278 and SEQ ID NO: 935; SEQ ID NO: 278 and SEQ ID NO: 936; SEQ ID NO: 278 and SEQ ID NO: 937; SEQ ID NO: 278 and SEQ ID NO: 938; SEQ ID NO: 279 and SEQ ID NO: 924; SEQ ID NO: 279 and SEQ ID NO: 925; SEQ ID NO: 279 and SEQ ID NO: 926; SEQ ID NO: 279 and SEQ ID NO: 927; SEQ ID NO: 279 and SEQ ID NO: 928; SEQ ID NO: 279 and SEQ ID NO: 929; SEQ ID NO: 279 and SEQ ID NO: 930; SEQ ID NO: 279 and SEQ ID NO: 931; SEQ ID NO: 279 and SEQ ID NO: 932; SEQ ID NO: 279 and SEQ ID NO: 933; SEQ ID NO: 279 and SEQ ID NO: 934; SEQ ID NO: 279 and SEQ ID NO: 935; SEQ ID NO: 279 and SEQ ID NO: 936; SEQ ID NO: 279 and SEQ ID NO: 937; SEQ ID NO: 279 and SEQ ID NO: 938; SEQ ID NO: 280 and SEQ ID NO: 924; SEQ ID NO: 280 and SEQ ID NO: 925; SEQ ID NO: 280 and SEQ ID NO: 926; SEQ ID NO: 280 and SEQ ID NO: 927; SEQ ID NO: 280 and SEQ ID NO: 928; SEQ ID NO: 280 and SEQ ID NO: 929; SEQ ID NO: 280 and SEQ ID NO: 930; SEQ ID NO: 280 and SEQ ID NO: 931; SEQ ID NO: 280 and SEQ ID NO: 932; SEQ ID NO: 280 and SEQ ID NO: 933; SEQ ID NO: 280 and SEQ ID NO: 934; SEQ ID NO: 280 and SEQ ID NO: 935; SEQ ID NO: 280 and SEQ ID NO: 936; SEQ ID NO: 280 and SEQ ID NO: 937; SEQ ID NO: 280 and SEQ ID NO: 938; SEQ ID NO: 281 and SEQ ID NO: 924; SEQ ID NO: 281 and SEQ ID NO: 925; SEQ ID NO: 281 and SEQ ID NO: 926; SEQ ID NO: 281 and SEQ ID NO: 927; SEQ ID NO: 281 and SEQ ID NO: 928; SEQ ID NO: 281 and SEQ ID NO: 929; SEQ ID NO: 281 and SEQ ID NO: 930; SEQ ID NO: 281 and SEQ ID NO: 931; SEQ ID NO: 281 and SEQ ID NO: 932; SEQ ID NO: 281 and SEQ ID NO: 933; SEQ ID NO: 281 and SEQ ID NO: 934; SEQ ID NO: 281 and SEQ ID NO: 935; SEQ ID NO: 281 and SEQ ID NO: 936; SEQ ID NO: 281 and SEQ ID NO: 937; SEQ ID NO: 281 and SEQ ID NO: 938; SEQ ID NO: 282 and SEQ ID NO: 924; SEQ ID NO: 282 and SEQ ID NO: 925; SEQ ID NO: 282 and SEQ ID NO: 926; SEQ ID NO: 282 and SEQ ID NO: 927; SEQ ID NO: 282 and SEQ ID NO: 928; SEQ ID NO: 282 and SEQ ID NO: 929; SEQ ID NO: 282 and SEQ ID NO: 930; SEQ ID NO: 282 and SEQ ID NO: 931; SEQ ID NO: 282 and SEQ ID NO: 932; SEQ ID NO: 282 and SEQ ID NO: 933; SEQ ID NO: 282 and SEQ ID NO: 934; SEQ ID NO: 282 and SEQ ID NO: 935; SEQ ID NO: 282 and SEQ ID NO: 936; SEQ ID NO: 282 and SEQ ID NO: 937; SEQ ID NO: 282 and SEQ ID NO: 938; SEQ ID NO: 283 and SEQ ID NO: 924; SEQ ID NO: 283 and SEQ ID NO: 925; SEQ ID NO: 283 and SEQ ID NO: 926; SEQ ID NO: 283 and SEQ ID NO: 927; SEQ ID NO: 283 and SEQ ID NO: 928; SEQ ID NO: 283 and SEQ ID NO: 929; SEQ ID NO: 283 and SEQ ID NO: 930; SEQ ID NO: 283 and SEQ ID NO: 931; SEQ ID NO: 283 and SEQ ID NO: 932; SEQ ID NO: 283 and SEQ ID NO: 933; SEQ ID NO: 283 and SEQ ID NO: 934; SEQ ID NO: 283 and SEQ ID NO: 935; SEQ ID NO: 283 and SEQ ID NO: 936; SEQ ID NO: 283 and SEQ ID NO: 937; SEQ ID NO: 283 and SEQ ID NO: 938; SEQ ID NO: 284 and SEQ ID NO: 924; SEQ ID NO: 284 and SEQ ID NO: 925; SEQ ID NO: 284 and SEQ ID NO: 926; SEQ ID NO: 284 and SEQ ID NO: 927; SEQ ID NO: 284 and SEQ ID NO: 928; SEQ ID NO: 284 and SEQ ID NO: 929; SEQ ID NO: 284 and SEQ ID NO: 930; SEQ ID NO: 284 and SEQ ID NO: 931; SEQ ID NO: 284 and SEQ ID NO: 932; SEQ ID NO: 284 and SEQ ID NO: 933; SEQ ID NO: 284 and SEQ ID NO: 934; SEQ ID NO: 284 and SEQ ID NO: 935; SEQ ID NO: 284 and SEQ ID NO: 936; SEQ ID NO: 284 and SEQ ID NO: 937; SEQ ID NO: 284 and SEQ ID NO: 938; SEQ ID NO: 285 and SEQ ID NO: 924; SEQ ID NO: 285 and SEQ ID NO: 925; SEQ ID NO: 285 and SEQ ID NO: 926; SEQ ID NO: 285 and SEQ ID NO: 927; SEQ ID NO: 285 and SEQ ID NO: 928; SEQ ID NO: 285 and SEQ ID NO: 929; SEQ ID NO: 285 and SEQ ID NO: 930; SEQ ID NO: 285 and SEQ ID NO: 931; SEQ ID NO: 285 and SEQ ID NO: 932; SEQ ID NO: 285 and SEQ ID NO: 933; SEQ ID NO: 285 and SEQ ID NO: 934; SEQ ID NO: 285 and SEQ ID NO: 935; SEQ ID NO: 285 and SEQ ID NO: 936; SEQ ID NO: 285 and SEQ ID NO: 937; SEQ ID NO: 285 and SEQ ID NO: 938; SEQ ID NO: 286 and SEQ ID NO: 924; SEQ ID NO: 286 and SEQ ID NO: 925; SEQ ID NO: 286 and SEQ ID NO: 926; SEQ ID NO: 286 and SEQ ID NO: 927; SEQ ID NO: 286 and SEQ ID NO: 928; SEQ ID NO: 286 and SEQ ID NO: 929; SEQ ID NO: 286 and SEQ ID NO: 930; SEQ ID NO: 286 and SEQ ID NO: 931; SEQ ID NO: 286 and SEQ ID NO: 932; SEQ ID NO: 286 and SEQ ID NO: 933; SEQ ID NO: 286 and SEQ ID NO: 934; SEQ ID NO: 286 and SEQ ID NO: 935; SEQ ID NO: 286 and SEQ ID NO: 936; SEQ ID NO: 286 and SEQ ID NO: 937; SEQ ID NO: 286 and SEQ ID NO: 938; SEQ ID NO: 287 and SEQ ID NO: 924; SEQ ID NO: 287 and SEQ ID NO: 925; SEQ ID NO: 287 and SEQ ID NO: 926; SEQ ID NO: 287 and SEQ ID NO: 927; SEQ ID NO: 287 and SEQ ID NO: 928; SEQ ID NO: 287 and SEQ ID NO: 929; SEQ ID NO: 287 and SEQ ID NO: 930; SEQ ID NO: 287 and SEQ ID NO: 931; SEQ ID NO: 287 and SEQ ID NO: 932; SEQ ID NO: 287 and SEQ ID NO: 933; SEQ ID NO: 287 and SEQ ID NO: 934; SEQ ID NO: 287 and SEQ ID NO: 935; SEQ ID NO: 287 and SEQ ID NO: 936; SEQ ID NO: 287 and SEQ ID NO: 937; SEQ ID NO: 287 and SEQ ID NO: 938; SEQ ID NO: 288 and SEQ ID NO: 924; SEQ ID NO: 288 and SEQ ID NO: 925; SEQ ID NO: 288 and SEQ ID NO: 926; SEQ ID NO: 288 and SEQ ID NO: 927; SEQ ID NO: 288 and SEQ ID NO: 928; SEQ ID NO: 288 and SEQ ID NO: 929; SEQ ID NO: 288 and SEQ ID NO: 930; SEQ ID NO: 288 and SEQ ID NO: 931; SEQ ID NO: 288 and SEQ ID NO: 932; SEQ ID NO: 288 and SEQ ID NO: 933; SEQ ID NO: 288 and SEQ ID NO: 934; SEQ ID NO: 288 and SEQ ID NO: 935; SEQ ID NO: 288 and SEQ ID NO: 936; SEQ ID NO: 288 and SEQ ID NO: 937; SEQ ID NO: 288 and SEQ ID NO: 938; SEQ ID NO: 289 and SEQ ID NO: 924; SEQ ID NO: 289 and SEQ ID NO: 925; SEQ ID NO: 289 and SEQ ID NO: 926; SEQ ID NO: 289 and SEQ ID NO: 927; SEQ ID NO: 289 and SEQ ID NO: 928; SEQ ID NO: 289 and SEQ ID NO: 929; SEQ ID NO: 289 and SEQ ID NO: 930; SEQ ID NO: 289 and SEQ ID NO: 931; SEQ ID NO: 289 and SEQ ID NO: 932; SEQ ID NO: 289 and SEQ ID NO: 933; SEQ ID NO: 289 and SEQ ID NO: 934; SEQ ID NO: 289 and SEQ ID NO: 935; SEQ ID NO: 289 and SEQ ID NO: 936; SEQ ID NO: 289 and SEQ ID NO: 937; SEQ ID NO: 289 and SEQ ID NO: 938; SEQ ID NO: 290 and SEQ ID NO: 924; SEQ ID NO: 290 and SEQ ID NO: 925; SEQ ID NO: 290 and SEQ ID NO: 926; SEQ ID NO: 290 and SEQ ID NO: 927; SEQ ID NO: 290 and SEQ ID NO: 928; SEQ ID NO: 290 and SEQ ID NO: 929; SEQ ID NO: 290 and SEQ ID NO: 930; SEQ ID NO: 290 and SEQ ID NO: 931; SEQ ID NO: 290 and SEQ ID NO: 932; SEQ ID NO: 290 and SEQ ID NO: 933; SEQ ID NO: 290 and SEQ ID NO: 934; SEQ ID NO: 290 and SEQ ID NO: 935; SEQ ID NO: 290 and SEQ ID NO: 936; SEQ ID NO: 290 and SEQ ID NO: 937; SEQ ID NO: 290 and SEQ ID NO: 938; SEQ ID NO: 291 and SEQ ID NO: 924; SEQ ID NO: 291 and SEQ ID NO: 925; SEQ ID NO: 291 and SEQ ID NO: 926; SEQ ID NO: 291 and SEQ ID NO: 927; SEQ ID NO: 291 and SEQ ID NO: 928; SEQ ID NO: 291 and SEQ ID NO: 929; SEQ ID NO: 291 and SEQ ID NO: 930; SEQ ID NO: 291 and SEQ ID NO: 931; SEQ ID NO: 291 and SEQ ID NO: 932; SEQ ID NO: 291 and SEQ ID NO: 933; SEQ ID NO: 291 and SEQ ID NO: 934; SEQ ID NO: 291 and SEQ ID NO: 935; SEQ ID NO: 291 and SEQ ID NO: 936; SEQ ID NO: 291 and SEQ ID NO: 937; SEQ ID NO: 291 and SEQ ID NO: 938; SEQ ID NO: 292 and SEQ ID NO: 924; SEQ ID NO: 292 and SEQ ID NO: 925; SEQ ID NO: 292 and SEQ ID NO: 926; SEQ ID NO: 292 and SEQ ID NO: 927; SEQ ID NO: 292 and SEQ ID NO: 928; SEQ ID NO: 292 and SEQ ID NO: 929; SEQ ID NO: 292 and SEQ ID NO: 930; SEQ ID NO: 292 and SEQ ID NO: 931; SEQ ID NO: 292 and SEQ ID NO: 932; SEQ ID NO: 292 and SEQ ID NO: 933; SEQ ID NO: 292 and SEQ ID NO: 934; SEQ ID NO: 292 and SEQ ID NO: 935; SEQ ID NO: 292 and SEQ ID NO: 936; SEQ ID NO: 292 and SEQ ID NO: 937; SEQ ID NO: 292 and SEQ ID NO: 938; SEQ ID NO: 950 and SEQ ID NO: 275; SEQ ID NO: 951 and SEQ ID NO: 275; SEQ ID NO: 952 and SEQ ID NO: 275; SEQ ID NO: 953 and SEQ ID NO: 275; SEQ ID NO: 954 and SEQ ID NO: 275; or SEQ ID NO: 955 and SEQ ID NO: 275; and a nucleic acid encoding a Staphylococcus lugdunensis (SluCas9), wherein the nucleic acid encoding the SluCas9 may be on the same or different nucleic acid molecule as the pair of guide RNAs.

[0359] In some embodiments, a method for treating DMD is provided comprising administering a composition comprising one or more guide RNAs wherein each guide RNA comprises a guide sequence of Table 6, or comprises a guide sequence comprising at least 16, 17, 18, 19, or 20 contiguous nucleotides of a guide sequence of Table 6, or is at least 90% identical to guide sequence selected from Table 6. In each instance, the composition may comprise a nucleic acid encoding the guide RNA(s). In some embodiments, a method for treating DMD is provided comprising administering a composition comprising one or more nucleic acid molecules encoding one or more guide RNAs, wherein each guide RNA comprises a guide sequence of Table 6, or at least 16, 17, 18, 19, or 20 contiguous nucleotides of a guide sequence of Table 6, or is at least 90% identical to guide sequence selected from Table 6.

[0360] In some embodiments, a method for treating DMD is provided comprising administering a composition comprising a guide RNA wherein the guide RNA comprises a guide sequence of Table 6, or at least 16, 17, 18, 19, or 20 contiguous nucleotides of a guide sequence of Table 6, or is at least 90% identical to guide sequence of Table 6. In each instance, the composition may comprise a nucleic acid encoding the guide RNA.

[0361] In some embodiments, a method for treating DMD is provided comprising administering a composition comprising a guide RNA comprising no more than 16, no more than 17, no more than 18, no more than 19, no more than 20, no more than 21, or no more than 22 contiguous nucleotides of a guide sequence of Table 6, or is at least 90% identical to no more than 16, no more than 17, no more than 18, no more than 19, no more than 20, no more than 21, or no more than 22 contiguous nucleotides of a guide sequence of Table 6. In each instance, the composition may comprise a nucleic acid encoding the guide RNA.

[0362] In some embodiments, a method for treating DMD is provided comprising administering a composition comprising two or more guide RNAs wherein each guide RNA comprises a guide sequence of Table 6, or at least 16, 17, 18, 19, or 20 contiguous nucleotides of a guide sequence of Table 6, or is at least 90% identical to guide sequence selected from Table 6. In each instance, the composition may comprise a nucleic acid encoding the guide RNA.

[0363] In some embodiments, a method for treating DMD is provided comprising administering a composition comprising two or more guide RNAs wherein at least one of the two or more guide RNAs, optionally each guide RNA, comprises no more than 16, no more than 17, no more than 18, no more than 19, no more than 20, no more than 21, or no more than 22 contiguous nucleotides of a guide sequence of Table 6, is at least 90% identical to no more than 16, no more than 17, no more than 18, no more than 19, no more than 20, no more than 21, or no more than 22 contiguous nucleotides of a guide sequence selected from Table 6. In each instance, the composition may comprise a nucleic acid encoding the guide RNA.

[0364] In some embodiments, a method for treating DMD is provided comprising administering a composition comprising a SaCas9 or SluCas9 or one or more nucleic acid molecules encoding a SaCas9 or SluCas9 and a pair of guide RNAs comprising a first guide sequence and a second guide sequence, wherein the first and second guide sequence are selected from the guide sequence pairs of:
[0365] a. For exon 44 (with e.g., SaCas9), SEQ ID NOs: 1 and 3; 110 and 120; 110 and 121; 110 and 122; 110 and 123; 110 and 124; 110 and 125; 111 and 112; 111 and 113; 111 and 114; 111 and 115; 111 and 116; 111 and 117; 111 and 118; 111 and 119; 111 and 120; 111 and 121; 111 and 122; 111 and 123; 111 and 124; 111 and 125; 112 and 113; 112 and 114; 112 and 115; 112 and 116; 112 and 117; 112 and 118; 112 and 119; 112 and 120; 112 and 121; 112 and 122; 112 and 123; 112 and 124; 112 and 125; 113 and 114; 113 and 115; 113 and 116; 113 and 117; 113 and 118; 113 and 119; 113 and 120; 113 and 121; 113 and 122; 113 and 123; 113 and 124; 113 and 125; 114 and 115; 114 and 116; 114 and 117; 114 and 118; 114 and 119; 114 and 120; 114 and 121; 114 and 122; 114 and 123; 114 and 124; 114 and 125; 115 and 116; 115 and 117; 115 and 118; 115 and 119; 115 and 120; 115 and 121; 115 and 122; 115 and 123; 115 and 124; 115 and 125; 116 and 117; 116 and 118; 116 and 119; 116 and 120; 116 and 121; 116 and 122; 116 and 123; 116 and 124; 116 and 125; 117 and 118; 117 and 119; 117 and 120; 117 and 121; 117 and 122; 117 and 123; 117 and 124; 117 and 125; 118 and 119; 118 and 120; 118 and 121; 118 and 122; 118 and 123; 118 and 124; 118 and 125; 119 and 120; 119 and 121; 119 and 122; 119 and 123; 119 and 124; 119 and 125; 120 and 121; 120 and 122; 120 and 123; 120 and 124; 120 and 125; 121 and 122; 121 and 123; 121 and 124; 121 and 125; 122 and 123; 122 and 124; 122 and 125; 123 and 124; 123 and 125; 124 and 125;
[0366] b. For exon 44 (with, e.g., SluCas9), SEQ ID NOs: 200 and 201; 200 and 202; 200 and 203; 200 and 204; 200 and 205; 200 and 206; 200 and 207; 200 and 208; 201 and 202; 201 and 203; 201 and 204; 201 and 205; 201 and 206; 201 and 207; 201 and 208; 202 and 203; 202 and 204; 202 and 205; 202 and 206; 202 and 207; 202 and 208; 203 and 204; 203 and 205; 203 and 206; 203 and 207; 203 and 208; 204 and 205; 204 and 206; 204 and 207; 204 and 208; 205 and 206; 205 and 207; 205 and 208; 206 and 207; 206 and 208; 207 and 208;
[0367] c. For exon 45 (with, e.g., SaCas9), SEQ ID NOs: 3 and 4; 3 and 5; 3 and 6; 3 and 7; 3 and 8; 3 and 9; 4 and 5; 4 and 6; 4 and 7; 4 and 8; 4 and 9; 5 and 6; 5 and 7; 5 and 8; 5 and 9; 6 and 7; 6 and 8; 6 and 9; 7 and 8; 7 and 9; 8 and 9; 126 and 127; 126 and 128; 126 and 129; 126 and 130; 126 and 131; 126 and 132; 126 and 133; 126 and 134; 126 and 135; 126 and 136; 126 and 137; 126 and 138; 126 and 139; 126 and 140; 126 and 141; 126 and 142; 126 and 143; 126 and 144; 126 and 145; 126 and 146; 126 and 147; 127 and 128; 127 and 129; 127 and 130; 127 and 131; 127 and 132; 127 and 133; 127 and 134; 127 and 135; 127 and 136; 127 and 137; 127 and 138; 127 and 139; 127 and 140; 127 and 141; 127 and 142; 127 and 143; 127 and 144; 127 and 145; 127 and 146; 127 and 147; 128 and 129; 128 and 130; 128 and 131; 128 and 132; 128 and 133; 128 and 134; 128 and 135; 128 and 136; 128 and 137; 128 and 138; 128 and 139; 128 and 140; 128 and 141; 128 and 142; 128 and 143; 128 and 144; 128 and 145; 128 and 146; 128 and 147; 129 and 130; 129 and 131; 129 and 132; 129 and 133; 129 and 134; 129 and 135; 129 and 136; 129 and 137; 129 and 138; 129 and 139; 129 and 140; 129 and 141; 129 and 142; 129 and 143; 129 and 144; 129 and 145; 129 and 146; 129 and 147; 130 and 131; 130 and 132; 130 and 133; 130 and 134; 130 and 135; 130 and 136; 130 and 137; 130 and 138; 130 and 139; 130 and 140; 130 and 141; 130 and 142; 130 and 143; 130 and 144; 130 and 145; 130 and 146; 130 and 147; 131 and 132; 131 and 133; 131 and 134; 131 and 135; 131 and 136; 131 and 137; 131 and 138; 131 and 139; 131 and 140; 131 and 141; 131 and 142; 131 and 143; 131 and 144; 131 and 145; 131 and 146; 131 and 147; 132 and 133; 132 and 134; 132 and 135; 132 and 136; 132 and 137; 132 and 138; 132 and 139; 132 and 140; 132 and 141; 132 and 142; 132 and 143; 132 and 144; 132 and 145; 132 and 146; 132 and 147; 133 and 134; 133 and 135; 133 and 136; 133 and 137; 133 and 138; 133 and 139; 133 and 140; 133 and 141; 133 and 142; 133 and 143; 133 and 144; 133 and 145; 133 and 146; 133 and 147; 134 and 135; 134 and 136; 134 and 137; 134 and 138; 134 and 139; 134 and 140; 134 and 141; 134 and 142; 134 and 143; 134 and 144; 134 and 145; 134 and 146; 134 and 147; 135 and 136; 135 and 137; 135 and 138; 135 and 139; 135 and 140; 135 and 141; 135 and 142; 135 and 143; 135 and 144; 135 and 145; 135 and 146; 135 and 147; 136 and 137; 136 and 138; 136 and 139; 136 and 140; 136 and 141; 136 and 142; 136 and 143; 136 and 144; 136 and 145; 136 and 146; 136 and 147; 137 and 138; 137 and 139; 137 and 140; 137 and 141; 137 and 142; 137 and 143; 137 and 144; 137 and 145; 137 and 146; 137 and 147; 138 and 139; 138 and 140; 138 and 141; 138 and 142; 138 and 143; 138 and 144; 138 and 145; 138 and 146; 138 and 147; 139 and 140; 139 and 141; 139 and 142; 139 and 143; 139 and 144; 139 and 145; 139 and 146; 139 and 147; 140 and 141; 140 and 142; 140 and 143; 140 and 144; 140 and 145; 140 and 146; 140 and 147; 141 and 142; 141 and 143; 141 and 144; 141 and 145; 141 and 146; 141 and 147; 142 and 143; 142 and 144; 142 and 145; 142 and 146; 142 and 147; 143 and 144; 143 and 145; 143 and 146; 143 and 147; 144 and 145; 144 and 146; 144 and 147; 145 and 146; 145 and 147; 146 and 147;
[0368] d. For exon 45 (with, e.g., SluCas9), SEQ ID NOs: 209 and 210; 209 and 211; 209 and 212; 209 and 213; 209 and 214; 209 and 215; 209 and 216; 209 and 217; 209 and 218; 209 and 219; 209 and 220; 209 and 221; 209 and 222; 209 and 223; 209 and 224; 209 and 225; 209 and 226; 209 and 227; 209 and 228; 209 and 229; 209 and 230; 210 and 211; 210 and 212; 210 and 213; 210 and 214; 210 and 215; 210 and 216; 210 and 217; 210 and 218; 210 and 219; 210 and 220; 210 and 221; 210 and 222; 210 and 223; 210 and 224; 210 and 225; 210 and 226; 210 and 227; 210 and 228; 210 and 229; 210 and 230; 211 and 212; 211 and 213; 211 and 214; 211 and 215; 211 and 216; 211 and 217; 211 and 218; 211 and 219; 211 and 220; 211 and 221; 211 and 222; 211 and 223; 211 and 224; 211 and 225; 211 and 226; 211 and 227; 211 and 228; 211 and 229; 211 and 230; 212 and 213; 212 and 214; 212 and 215; 212 and 216; 212 and 217; 212 and 218; 212 and 219; 212 and 220; 212 and 221; 212 and 222; 212 and 223; 212 and 224; 212 and 225; 212 and 226; 212 and 227; 212 and 228; 212 and 229; 212 and 230; 213 and 214; 213 and 215; 213 and 216; 213 and 217; 213 and 218; 213 and 219; 213 and 220; 213 and 221; 213 and 222; 213 and 223; 213 and 224; 213 and 225; 213 and 226; 213 and 227; 213 and 228; 213 and 229; 213 and 230; 214 and 215; 214 and 216; 214 and 217; 214 and 218; 214 and 219; 214 and 220; 214 and 221; 214 and 222; 214 and 223; 214 and 224; 214 and 225; 214 and 226; 214 and 227; 214 and 228; 214 and 229; 214 and 230; 215 and 216; 215 and 217; 215 and 218; 215 and 219; 215 and 220; 215 and 221; 215 and 222; 215 and 223; 215 and 224; 215 and 225; 215 and 226; 215 and 227; 215 and 228; 215 and 229; 215 and 230; 216 and 217; 216 and 218; 216 and 219; 216 and 220; 216 and 221; 216 and 222; 216 and 223; 216 and 224; 216 and 225; 216 and 226; 216 and 227; 216 and 228; 216 and 229; 216 and 230; 217 and 218; 217 and 219; 217 and 220; 217 and 221; 217 and 222; 217 and 223; 217 and 224; 217 and 225; 217 and 226; 217 and 227; 217 and 228; 217 and 229; 217 and 230; 218 and 219; 218 and 220; 218 and 221; 218 and 222; 218 and 223; 218 and 224; 218 and 225; 218 and 226; 218 and 227; 218 and 228; 218 and 229; 218 and 230; 219 and 220; 219 and 221; 219 and 222; 219 and 223; 219 and 224; 219 and 225; 219 and 226; 219 and 227; 219 and 228; 219 and 229; 219 and 230; 220 and 221; 220 and 222; 220 and 223; 220 and 224; 220 and 225; 220 and 226; 220 and 227; 220 and 228; 220 and 229; 220 and 230; 221 and 222; 221 and 223; 221 and 224; 221 and 225; 221 and 226; 221 and 227; 221 and 228; 221 and 229; 221 and 230; 222 and 223; 222 and 224; 222 and 225; 222 and 226; 222 and 227; 222 and 228; 222 and 229; 222 and 230; 223 and 224; 223 and 225; 223 and 226; 223 and 227; 223 and 228; 223 and 229; 223 and 230; 224 and 225; 224 and 226; 224 and 227; 224 and 228; 224 and 229; 224 and 230; 225 and 226; 225 and 227; 225 and 228; 225 and 229; 225 and 230; 226 and 227; 226 and 228; 226 and 229; 226 and 230; 227 and 228; 227 and 229; 227 and 230; 228 and 229; 228 and 230; 229 and 230;
[0369] e. For exon 50 (with, e.g., SaCas9), SEQ ID NOs: 148 and 149; 148 and 150; 148 and 151; 148 and 152; 148 and 153; 148 and 154; 148 and 155; 148 and 156; 148 and 157; 148 and 158; 148 and 159; 149 and 150; 149 and 151; 149 and 152; 149 and 153; 149 and 154; 149 and 155; 149 and 156; 149 and 157; 149 and 158; 149 and 159; 150 and 151; 150 and 152; 150 and 153; 150 and 154; 150 and 155; 150 and 156; 150 and 157; 150 and 158; 150 and 159; 151 and 152; 151 and 153; 151 and 154; 151 and 155; 151 and 156; 151 and 157; 151 and 158; 151 and 159; 152 and 153; 152 and 154; 152 and 155; 152 and 156; 152 and 157; 152 and 158; 152 and 159; 153 and 154; 153 and 155; 153 and 156; 153 and 157; 153 and 158; 153 and 159; 154 and 155; 154 and 156; 154 and 157; 154 and 158; 154 and 159; 155 and 156; 155 and 157; 155 and 158; 155 and 159; 156 and 157; 156 and 158; 156 and 159; 157 and 158; 157 and 159; 158 and 159;
[0370] f. For exon 50 (with, e.g., SluCas9), SEQ ID NOs: 231 and 232; 231 and 233; 231 and 234; 231 and 235; 231 and 236; 231 and 237; 231 and 238; 231 and 239; 231 and 240; 231 and 241; 231 and 242; 232 and 233; 232 and 234; 232 and 235; 232 and 236; 232 and 237; 232 and 238; 232 and 239; 232 and 240; 232 and 241; 232 and 242; 233 and 234; 233 and 235; 233 and 236; 233 and 237; 233 and 238; 233 and 239; 233 and 240; 233 and 241; 233 and 242; 234 and 235; 234 and 236; 234 and 237; 234 and 238; 234 and 239; 234 and 240; 234 and 241; 234 and 242; 235 and 236; 235 and 237; 235 and 238; 235 and 239; 235 and 240; 235 and 241; 235 and 242; 236 and 237; 236 and 238; 236 and 239; 236 and 240; 236 and 241; 236 and 242; 237 and 238; 237 and 239; 237 and 240; 237 and 241; 237 and 242; 238 and 239; 238 and 240; 238 and 241; 238 and 242; 239 and 240; 239 and 241; 239 and 242; 240 and 241; 240 and 242; 241 and 242;
[0371] g. For exon 51 (with, e.g., SaCas9), SEQ ID NOs: 11 and 12; 11 and 13; 11 and 14; 11 and 15; 12 and 13; 12 and 14; 12 and 15; 13 and 14; 13 and 15; 14 and 15; 27 and 28; 27 and 29; 27 and 30; 27 and 31; 27 and 32; 27 and 33; 27 and 34; 27 and 35; 27 and 36; 27 and 37; 27 and 38; 27 and 39; 27 and 40; 27 and 41; 27 and 42; 27 and 43; 27 and 44; 27 and 45; 27 and 46; 27 and 47; 27 and 48; 27 and 53; 27 and 54; 27 and 55; 27 and 56; 27 and 57; 27 and 58; 27 and 59; 27 and 60; 27 and 61; 27 and 62; 27 and 63; 27 and 64; 27 and 65; 27 and 66; 27 and 67; 27 and 68; 27 and 69; 28 and 29; 28 and 30; 28 and 31; 28 and 32; 28 and 33; 28 and 34; 28 and 35; 28 and 36; 28 and 37; 28 and 38; 28 and 39; 28 and 40; 28 and 41; 28 and 42; 28 and 43; 28 and 44; 28 and 45; 28 and 46; 28 and 47; 28 and 48; 28 and 53; 28 and 54; 28 and 55; 28 and 56; 28 and 57; 28 and 58; 28 and 59; 28 and 60; 28 and 61; 28 and 62; 28 and 63; 28 and 64; 28 and 65; 28 and 66; 28 and 67; 28 and 68; 28 and 69; 29 and 30; 29 and 31; 29 and 32; 29 and 33; 29 and 34; 29 and 35; 29 and 36; 29 and 37; 29 and 38; 29 and 39; 29 and 40; 29 and 41; 29 and 42; 29 and 43; 29 and 44; 29 and 45; 29 and 46; 29 and 47; 29 and 48; 29 and 53; 29 and 54; 29 and 55; 29 and 56; 29 and 57; 29 and 58; 29 and 59; 29 and 60; 29 and 61; 29 and 62; 29 and 63; 29 and 64; 29 and 65; 29 and 66; 29 and 67; 29 and 68; 29 and 69; 30 and 31; 30 and 32; 30 and 33; 30 and 34; 30 and 35; 30 and 36; 30 and 37; 30 and 38; 30 and 39; 30 and 40; 30 and 41; 30 and 42; 30 and 43; 30 and 44; 30 and 45; 30 and 46; 30 and 47; 30 and 48; 30 and 53; 30 and 54; 30 and 55; 30 and 56; 30 and 57; 30 and 58; 30 and 59; 30 and 60; 30 and 61; 30 and 62; 30 and 63; 30 and 64; 30 and 65; 30 and 66; 30 and 67; 30 and 68; 30 and 69; 31 and 32; 31 and 33; 31 and 34; 31 and 35; 31 and 36; 31 and 37; 31 and 38; 31 and 39; 31 and 40; 31 and 41; 31 and 42; 31 and 43; 31 and 44; 31 and 45; 31 and 46; 31 and 47; 31 and 48; 31 and 53; 31 and 54; 31 and 55; 31 and 56; 31 and 57; 31 and 58; 31 and 59; 31 and 60; 31 and 61; 31 and 62; 31 and 63; 31 and 64; 31 and 65; 31 and 66; 31 and 67; 31 and 68; 31 and 69; 32 and 33; 32 and 34; 32 and 35; 32 and 36; 32 and 37; 32 and 38; 32 and 39; 32 and 40; 32 and 41; 32 and 42; 32 and 43; 32 and 44; 32 and 45; 32 and 46; 32 and 47; 32 and 48; 32 and 53; 32 and 54; 32 and 55; 32 and 56; 32 and 57; 32 and 58; 32 and 59; 32 and 60; 32 and 61; 32 and 62; 32 and 63; 32 and 64; 32 and 65; 32 and 66; 32 and 67; 32 and 68; 32 and 69; 33 and 34; 33 and 35; 33 and 36; 33 and 37; 33 and 38; 33 and 39; 33 and 40; 33 and 41; 33 and 42; 33 and 43; 33 and 44; 33 and 45; 33 and 46; 33 and 47; 33 and 48; 33 and 53; 33 and 54; 33 and 55; 33 and 56; 33 and 57; 33 and 58; 33 and 59; 33 and 60; 33 and 61; 33 and 62; 33 and 63; 33 and 64; 33 and 65; 33 and 66; 33 and 67; 33 and 68; 33 and 69; 34 and 35; 34 and 36; 34 and 37; 34 and 38; 34 and 39; 34 and 40; 34 and 41; 34 and 42; 34 and 43; 34 and 44; 34 and 45; 34 and 46; 34 and 47; 34 and 48; 34 and 53; 34 and 54; 34 and 55; 34 and 56; 34 and 57; 34 and 58; 34 and 59; 34 and 60; 34 and 61; 34 and 62; 34 and 63; 34 and 64; 34 and 65; 34 and 66; 34 and 67; 34 and 68; 34 and 69; 35 and 36; 35 and 37; 35 and 38; 35 and 39; 35 and 40; 35 and 41; 35 and 42; 35 and 43; 35 and 44; 35 and 45; 35 and 46; 35 and 47; 35 and 48; 35 and 53; 35 and 54; 35 and 55; 35 and 56; 35 and 57; 35 and 58; 35 and 59; 35 and 60; 35 and 61; 35 and 62; 35 and 63; 35 and 64; 35 and 65; 35 and 66; 35 and 67; 35 and 68; 35 and 69; 36 and 37; 36 and 38; 36 and 39; 36 and 40; 36 and 41; 36 and 42; 36 and 43; 36 and 44; 36 and 45; 36 and 46; 36 and 47; 36 and 48; 36 and 53; 36 and 54; 36 and 55; 36 and 56; 36 and 57; 36 and 58; 36 and 59; 36 and 60; 36 and 61; 36 and 62; 36 and 63; 36 and 64; 36 and 65; 36 and 66; 36 and 67; 36 and 68; 36 and 69; 37 and 38; 37 and 39; 37 and 40; 37 and 41; 37 and 42; 37 and 43; 37 and 44; 37 and 45; 37 and 46; 37 and 47; 37 and 48; 37 and 53; 37 and 54; 37 and 55; 37 and 56; 37 and 57; 37 and 58; 37 and 59; 37 and 60; 37 and 61; 37 and 62; 37 and 63; 37 and 64; 37 and 65; 37 and 66; 37 and 67; 37 and 68; 37 and 69; 38 and 39; 38 and 40; 38 and 41; 38 and 42; 38 and 43; 38 and 44; 38 and 45; 38 and 46; 38 and 47; 38 and 48; 38 and 53; 38 and 54; 38 and 55; 38 and 56; 38 and 57; 38 and 58; 38 and 59; 38 and 60; 38 and 61; 38 and 62; 38 and 63; 38 and 64; 38 and 65; 38 and 66; 38 and 67; 38 and 68; 38 and 69; 39 and 40; 39 and 41; 39 and 42; 39 and 43; 39 and 44; 39 and 45; 39 and 46; 39 and 47; 39 and 48; 39 and 53; 39 and 54; 39 and 55; 39 and 56; 39 and 57; 39 and 58; 39 and 59; 39 and 60; 39 and 61; 39 and 62; 39 and 63; 39 and 64; 39 and 65; 39 and 66; 39 and 67; 39 and 68; 39 and 69; 40 and 41; 40 and 42; 40 and 43; 40 and 44; 40 and 45; 40 and 46; 40 and 47; 40 and 48; 40 and 53; 40 and 54; 40 and 55; 40 and 56; 40 and 57; 40 and 58; 40 and 59; 40 and 60; 40 and 61; 40 and 62; 40 and 63; 40 and 64; 40 and 65; 40 and 66; 40 and 67; 40 and 68; 40 and 69; 41 and 42; 41 and 43; 41 and 44; 41 and 45; 41 and 46; 41 and 47; 41 and 48; 41 and 53; 41 and 54; 41 and 55; 41 and 56; 41 and 57; 41 and 58; 41 and 59; 41 and 60; 41 and 61; 41 and 62; 41 and 63; 41 and 64; 41 and 65; 41 and 66; 41 and 67; 41 and 68; 41 and 69; 42 and 43; 42 and 44; 42 and 45; 42 and 46; 42 and 47; 42 and 48; 42 and 53; 42 and 54; 42 and 55; 42 and 56; 42 and 57; 42 and 58; 42 and 59; 42 and 60; 42 and 61; 42 and 62; 42 and 63; 42 and 64; 42 and 65; 42 and 66; 42 and 67; 42 and 68; 42 and 69; 43 and 44; 43 and 45; 43 and 46; 43 and 47; 43 and 48; 43 and 53; 43 and 54; 43 and 55; 43 and 56; 43 and 57; 43 and 58; 43 and 59; 43 and 60; 43 and 61; 43 and 62; 43 and 63; 43 and 64; 43 and 65; 43 and 66; 43 and 67; 43 and 68; 43 and 69; 44 and 45; 44 and 46; 44 and 47; 44 and 48; 44 and 53; 44 and 54; 44 and 55; 44 and 56; 44 and 57; 44 and 58; 44 and 59; 44 and 60; 44 and 61; 44 and 62; 44 and 63; 44 and 64; 44 and 65; 44 and 66; 44 and 67; 44 and 68; 44 and 69; 45 and 46; 45 and 47; 45 and 48; 45 and 53; 45 and 54; 45 and 55; 45 and 56; 45 and 57; 45 and 58; 45 and 59; 45 and 60; 45 and 61; 45 and 62; 45 and 63; 45 and 64; 45 and 65; 45 and 66; 45 and 67; 45 and 68; 45 and 69; 46 and 47; 46 and 48; 46 and 53; 46 and 54; 46 and 55; 46 and 56; 46 and 57; 46 and 58; 46 and 59; 46 and 60; 46 and 61; 46 and 62; 46 and 63; 46 and 64; 46 and 65; 46 and 66; 46 and 67; 46 and 68; 46 and 69; 47 and 48; 47 and 53; 47 and 54; 47 and 55; 47 and 56; 47 and 57; 47 and 58; 47 and 59; 47 and 60; 47 and 61; 47 and 62; 47 and 63; 47 and 64; 47 and 65; 47 and 66; 47 and 67; 47 and 68; 47 and 69; 48 and 53; 48 and 54; 48 and 55; 48 and 56; 48 and 57; 48 and 58; 48 and 59; 48 and 60; 48 and 61; 48 and 62; 48 and 63; 48 and 64; 48 and 65; 48 and 66; 48 and 67; 48 and 68; 48 and 69; 53 and 54; 53 and 55; 53 and 56; 53 and 57; 53 and 58; 53 and 59; 53 and 60; 53 and 61; 53 and 62; 53 and 63; 53 and 64; 53 and 65; 53 and 66; 53 and 67; 53 and 68; 53 and 69; 54 and 55; 54 and 56; 54 and 57; 54 and 58; 54 and 59; 54 and 60; 54 and 61; 54 and 62; 54 and 63; 54 and 64; 54 and 65; 54 and 66; 54 and 67; 54 and 68; 54 and 69; 55 and 56; 55 and 57; 55 and 58; 55 and 59; 55 and 60; 55 and 61; 55 and 62; 55 and 63; 55 and 64; 55 and 65; 55 and 66; 55 and 67; 55 and 68; 55 and 69; 56 and 57; 56 and 58; 56 and 59; 56 and 60; 56 and 61; 56 and 62; 56 and 63; 56 and 64; 56 and 65; 56 and 66; 56 and 67; 56 and 68; 56 and 69; 57 and 58; 57 and 59; 57 and 60; 57 and 61; 57 and 62; 57 and 63; 57 and 64; 57 and 65; 57 and 66; 57 and 67; 57 and 68; 57 and 69; 58 and 59; 58 and 60; 58 and 61; 58 and 62; 58 and 63; 58 and 64; 58 and 65; 58 and 66; 58 and 67; 58 and 68; 58 and 69; 59 and 60; 59 and 61; 59 and 62; 59 and 63; 59 and 64; 59 and 65; 59 and 66; 59 and 67; 59 and 68; 59 and 69; 60 and 61; 60 and 62; 60 and 63; 60 and 64; 60 and 65; 60 and 66; 60 and 67; 60 and 68; 60 and 69; 61 and 62; 61 and 63; 61 and 64; 61 and 65; 61 and 66; 61 and 67; 61 and 68; 61 and 69; 62 and 63; 62 and 64; 62 and 65; 62 and 66; 62 and 67; 62 and 68; 62 and 69; 63 and 64; 63 and 65; 63 and 66; 63 and 67; 63 and 68; 63 and 69; 64 and 65; 64 and 66; 64 and 67; 64 and 68; 64 and 69; 65 and 66; 65 and 67; 65 and 68; 65 and 69; 66 and 67; 66 and 68; 66 and 69; 67 and 68; 67 and 69; 68 and 69;
[0372] h. For exon 51 (with, e.g., SluCas9), SEQ ID NOs: 243 and 244; 243 and 245; 243 and 246; 243 and 247; 243 and 248; 243 and 249; 243 and 250; 243 and 251; 243 and 252; 243 and 253; 243 and 254; 243 and 255; 243 and 256; 243 and 257; 243 and 258; 243 and 259; 243 and 260; 243 and 261; 243 and 262; 243 and 263; 243 and 264; 243 and 265; 243 and 266; 243 and 267; 243 and 268; 243 and 269; 244 and 245; 244 and 246; 244 and 247; 244 and 248; 244 and 249; 244 and 250; 244 and 251; 244 and 252; 244 and 253; 244 and 254; 244 and 255; 244 and 256; 244 and 257; 244 and 258; 244 and 259; 244 and 260; 244 and 261; 244 and 262; 244 and 263; 244 and 264; 244 and 265; 244 and 266; 244 and 267; 244 and 268; 244 and 269; 245 and 246; 245 and 247; 245 and 248; 245 and 249; 245 and 250; 245 and 251; 245 and 252; 245 and 253; 245 and 254; 245 and 255; 245 and 256; 245 and 257; 245 and 258; 245 and 259; 245 and 260; 245 and 261; 245 and 262; 245 and 263; 245 and 264; 245 and 265; 245 and 266; 245 and 267; 245 and 268; 245 and 269; 246 and 247; 246 and 248; 246 and 249; 246 and 250; 246 and 251; 246 and 252; 246 and 253; 246 and 254; 246 and 255; 246 and 256; 246 and 257; 246 and 258; 246 and 259; 246 and 260; 246 and 261; 246 and 262; 246 and 263; 246 and 264; 246 and 265; 246 and 266; 246 and 267; 246 and 268; 246 and 269; 247 and 248; 247 and 249; 247 and 250; 247 and 251; 247 and 252; 247 and 253; 247 and 254; 247 and 255; 247 and 256; 247 and 257; 247 and 258; 247 and 259; 247 and 260; 247 and 261; 247 and 262; 247 and 263; 247 and 264; 247 and 265; 247 and 266; 247 and 267; 247 and 268; 247 and 269; 248 and 249; 248 and 250; 248 and 251; 248 and 252; 248 and 253; 248 and 254; 248 and 255; 248 and 256; 248 and 257; 248 and 258; 248 and 259; 248 and 260; 248 and 261; 248 and 262; 248 and 263; 248 and 264; 248 and 265; 248 and 266; 248 and 267; 248 and 268; 248 and 269; 249 and 250; 249 and 251; 249 and 252; 249 and 253; 249 and 254; 249 and 255; 249 and 256; 249 and 257; 249 and 258; 249 and 259; 249 and 260; 249 and 261; 249 and 262; 249 and 263; 249 and 264; 249 and 265; 249 and 266; 249 and 267; 249 and 268; 249 and 269; 250 and 251; 250 and 252; 250 and 253; 250 and 254; 250 and 255; 250 and 256; 250 and 257; 250 and 258; 250 and 259; 250 and 260; 250 and 261; 250 and 262; 250 and 263; 250 and 264; 250 and 265; 250 and 266; 250 and 267; 250 and 268; 250 and 269; 251 and 252; 251 and 253; 251 and 254; 251 and 255; 251 and 256; 251 and 257; 251 and 258; 251 and 259; 251 and 260; 251 and 261; 251 and 262; 251 and 263; 251 and 264; 251 and 265; 251 and 266; 251 and 267; 251 and 268; 251 and 269; 252 and 253; 252 and 254; 252 and 255; 252 and 256; 252 and 257; 252 and 258; 252 and 259; 252 and 260; 252 and 261; 252 and 262; 252 and 263; 252 and 264; 252 and 265; 252 and 266; 252 and 267; 252 and 268; 252 and 269; 253 and 254; 253 and 255; 253 and 256; 253 and 257; 253 and 258; 253 and 259; 253 and 260; 253 and 261; 253 and 262; 253 and 263; 253 and 264; 253 and 265; 253 and 266; 253 and 267; 253 and 268; 253 and 269; 254 and 255; 254 and 256; 254 and 257; 254 and 258; 254 and 259; 254 and 260; 254 and 261; 254 and 262; 254 and 263; 254 and 264; 254 and 265; 254 and 266; 254 and 267; 254 and 268; 254 and 269; 255 and 256; 255 and 257; 255 and 258; 255 and 259; 255 and 260; 255 and 261; 255 and 262; 255 and 263; 255 and 264; 255 and 265; 255 and 266; 255 and 267; 255 and 268; 255 and 269; 256 and 257; 256 and 258; 256 and 259; 256 and 260; 256 and 261; 256 and 262; 256 and 263; 256 and 264; 256 and 265; 256 and 266; 256 and 267; 256 and 268; 256 and 269; 257 and 258; 257 and 259; 257 and 260; 257 and 261; 257 and 262; 257 and 263; 257 and 264; 257 and 265; 257 and 266; 257 and 267; 257 and 268; 257 and 269; 258 and 259; 258 and 260; 258 and 261; 258 and 262; 258 and 263; 258 and 264; 258 and 265; 258 and 266; 258 and 267; 258 and 268; 258 and 269; 259 and 260; 259 and 261; 259 and 262; 259 and 263; 259 and 264; 259 and 265; 259 and 266; 259 and 267; 259 and 268; 259 and 269; 260 and 261; 260 and 262; 260 and 263; 260 and 264; 260 and 265; 260 and 266; 260 and 267; 260 and 268; 260 and 269; 261 and 262; 261 and 263; 261 and 264; 261 and 265; 261 and 266; 261 and 267; 261 and 268; 261 and 269; 262 and 263; 262 and 264; 262 and 265; 262 and 266; 262 and 267; 262 and 268; 262 and 269; 263 and 264; 263 and 265; 263 and 266; 263 and 267; 263 and 268; 263 and 269; 264 and 265; 264 and 266; 264 and 267; 264 and 268; 264 and 269; 265 and 266; 265 and 267; 265 and 268; 265 and 269; 266 and 267; 266 and 268; 266 and 269; 267 and 268; 267 and 269; 268 and 269;
[0373] i. For exon 53 (with, e.g., SaCas9), SEQ ID NOs: 16 and 17; 16 and 18; 16 and 19; 16 and 20; 16 and 21; 16 and 22; 16 and 23; 16 and 24; 16 and 25; 16 and 26; 17 and 18; 17 and 19; 17 and 20; 17 and 21; 17 and 22; 17 and 23; 17 and 24; 17 and 25; 17 and 26; 18 and 19; 18 and 20; 18 and 21; 18 and 22; 18 and 23; 18 and 24; 18 and 25; 18 and 26; 19 and 20; 19 and 21; 19 and 22; 19 and 23; 19 and 24; 19 and 25; 19 and 26; 20 and 21; 20 and 22; 20 and 23; 20 and 24; 20 and 25; 20 and 26; 21 and 22; 21 and 23; 21 and 24; 21 and 25; 21 and 26; 22 and 23; 22 and 24; 22 and 25; 22 and 26; 23 and 24; 23 and 25; 23 and 26; 24 and 25; 24 and 26; 25 and 26; 71 and 72; 71 and 73; 71 and 74; 71 and 75; 71 and 76; 71 and 77; 71 and 78; 71 and 84; 71 and 85; 71 and 86; 71 and 87; 71 and 88; 71 and 89; 71 and 90; 71 and 91; 71 and 92; 71 and 93; 71 and 94; 71 and 95; 71 and 96; 71 and 97; 71 and 98; 71 and 99; 71 and 100; 71 and 101; 71 and 102; 72 and 73; 72 and 74; 72 and 75; 72 and 76; 72 and 77; 72 and 78; 72 and 84; 72 and 85; 72 and 86; 72 and 87; 72 and 88; 72 and 89; 72 and 90; 72 and 91; 72 and 92; 72 and 93; 72 and 94; 72 and 95; 72 and 96; 72 and 97; 72 and 98; 72 and 99; 72 and 100; 72 and 101; 72 and 102; 73 and 74; 73 and 75; 73 and 76; 73 and 77; 73 and 78; 73 and 84; 73 and 85; 73 and 86; 73 and 87; 73 and 88; 73 and 89; 73 and 90; 73 and 91; 73 and 92; 73 and 93; 73 and 94; 73 and 95; 73 and 96; 73 and 97; 73 and 98; 73 and 99; 73 and 100; 73 and 101; 73 and 102; 74 and 75; 74 and 76; 74 and 77; 74 and 78; 74 and 84; 74 and 85; 74 and 86; 74 and 87; 74 and 88; 74 and 89; 74 and 90; 74 and 91; 74 and 92; 74 and 93; 74 and 94; 74 and 95; 74 and 96; 74 and 97; 74 and 98; 74 and 99; 74 and 100; 74 and 101; 74 and 102; 75 and 76; 75 and 77; 75 and 78; 75 and 84; 75 and 85; 75 and 86; 75 and 87; 75 and 88; 75 and 89; 75 and 90; 75 and 91; 75 and 92; 75 and 93; 75 and 94; 75 and 95; 75 and 96; 75 and 97; 75 and 98; 75 and 99; 75 and 100; 75 and 101; 75 and 102; 76 and 77; 76 and 78; 76 and 84; 76 and 85; 76 and 86; 76 and 87; 76 and 88; 76 and 89; 76 and 90; 76 and 91; 76 and 92; 76 and 93; 76 and 94; 76 and 95; 76 and 96; 76 and 97; 76 and 98; 76 and 99; 76 and 100; 76 and 101; 76 and 102; 77 and 78; 77 and 84; 77 and 85; 77 and 86; 77 and 87; 77 and 88; 77 and 89; 77 and 90; 77 and 91; 77 and 92; 77 and 93; 77 and 94; 77 and 95; 77 and 96; 77 and 97; 77 and 98; 77 and 99; 77 and 100; 77 and 101; 77 and 102; 78 and 84; 78 and 85; 78 and 86; 78 and 87; 78 and 88; 78 and 89; 78 and 90; 78 and 91; 78 and 92; 78 and 93; 78 and 94; 78 and 95; 78 and 96; 78 and 97; 78 and 98; 78 and 99; 78 and 100; 78 and 101; 78 and 102; 84 and 85; 84 and 86; 84 and 87; 84 and 88; 84 and 89; 84 and 90; 84 and 91; 84 and 92; 84 and 93; 84 and 94; 84 and 95; 84 and 96; 84 and 97; 84 and 98; 84 and 99; 84 and 100; 84 and 101; 84 and 102; 85 and 86; 85 and 87; 85 and 88; 85 and 89; 85 and 90; 85 and 91; 85 and 92; 85 and 93; 85 and 94; 85 and 95; 85 and 96; 85 and 97; 85 and 98; 85 and 99; 85 and 100; 85 and 101; 85 and 102; 86 and 87; 86 and 88; 86 and 89; 86 and 90; 86 and 91; 86 and 92; 86 and 93; 86 and 94; 86 and 95; 86 and 96; 86 and 97; 86 and 98; 86 and 99; 86 and 100; 86 and 101; 86 and 102; 87 and 88; 87 and 89; 87 and 90; 87 and 91; 87 and 92; 87 and 93; 87 and 94; 87 and 95; 87 and 96; 87 and 97; 87 and 98; 87 and 99; 87 and 100; 87 and 101; 87 and 102; 88 and 89; 88 and 90; 88 and 91; 88 and 92; 88 and 93; 88 and 94; 88 and 95; 88 and 96; 88 and 97; 88 and 98; 88 and 99; 88 and 100; 88 and 101; 88 and 102; 89 and 90; 89 and 91; 89 and 92; 89 and 93; 89 and 94; 89 and 95; 89 and 96; 89 and 97; 89 and 98; 89 and 99; 89 and 100; 89 and 101; 89 and 102; 90 and 91; 90 and 92; 90 and 93; 90 and 94; 90 and 95; 90 and 96; 90 and 97; 90 and 98; 90 and 99; 90 and 100; 90 and 101; 90 and 102; 91 and 92; 91 and 93; 91 and 94; 91 and 95; 91 and 96; 91 and 97; 91 and 98; 91 and 99; 91 and 100; 91 and 101; 91 and 102; 92 and 93; 92 and 94; 92 and 95; 92 and 96; 92 and 97; 92 and 98; 92 and 99; 92 and 100; 92 and 101; 92 and 102; 93 and 94; 93 and 95; 93 and 96; 93 and 97; 93 and 98; 93 and 99; 93 and 100; 93 and 101; 93 and 102; 94 and 95; 94 and 96; 94 and 97; 94 and 98; 94 and 99; 94 and 100; 94 and 101; 94 and 102; 95 and 96; 95 and 97; 95 and 98; 95 and 99; 95 and 100; 95 and 101; 95 and 102; 96 and 97; 96 and 98; 96 and 99; 96 and 100; 96 and 101; 96 and 102; 97 and 98; 97 and 99; 97 and 100; 97 and 101; 97 and 102; 98 and 99; 98 and 100; 98 and 101; 98 and 102; 99 and 100; 99 and 101; 99 and 102; 100 and 101; 100 and 102; 101 and 102;
[0374] j. For exon 53 (with, e.g., SluCas9), SEQ ID NOs: 270 and 271; 270 and 272; 270 and 273; 270 and 274; 270 and 275; 270 and 276; 270 and 277; 270 and 278; 270 and 279; 270 and 280; 270 and 281; 270 and 282; 270 and 283; 270 and 284; 270 and 285; 270 and 286; 270 and 287; 270 and 288; 270 and 289; 270 and 290; 270 and 291; 270 and 292; 271 and 272; 271 and 273; 271 and 274; 271 and 275; 271 and 276; 271 and 277; 271 and 278; 271 and 279; 271 and 280; 271 and 281; 271 and 282; 271 and 283; 271 and 284; 271 and 285; 271 and 286; 271 and 287; 271 and 288; 271 and 289; 271 and 290; 271 and 291; 271 and 292; 272 and 273; 272 and 274; 272 and 275; 272 and 276; 272 and 277; 272 and 278; 272 and 279; 272 and 280; 272 and 281; 272 and 282; 272 and 283; 272 and 284; 272 and 285; 272 and 286; 272 and 287; 272 and 288; 272 and 289; 272 and 290; 272 and 291; 272 and 292; 273 and 274; 273 and 275; 273 and 276; 273 and 277; 273 and 278; 273 and 279; 273 and 280; 273 and 281; 273 and 282; 273 and 283; 273 and 284; 273 and 285; 273 and 286; 273 and 287; 273 and 288; 273 and 289; 273 and 290; 273 and 291; 273 and 292; 274 and 275; 274 and 276; 274 and 277; 274 and 278; 274 and 279; 274 and 280; 274 and 281; 274 and 282; 274 and 283; 274 and 284; 274 and 285; 274 and 286; 274 and 287; 274 and 288; 274 and 289; 274 and 290; 274 and 291; 274 and 292; 275 and 276; 275 and 277; 275 and 278; 275 and 279; 275 and 280; 275 and 281; 275 and 282; 275 and 283; 275 and 284; 275 and 285; 275 and 286; 275 and 287; 275 and 288; 275 and 289; 275 and 290; 275 and 291; 275 and 292; 276 and 277; 276 and 278; 276 and 279; 276 and 280; 276 and 281; 276 and 282; 276 and 283; 276 and 284; 276 and 285; 276 and 286; 276 and 287; 276 and 288; 276 and 289; 276 and 290; 276 and 291; 276 and 292; 277 and 278; 277 and 279; 277 and 280; 277 and 281; 277 and 282; 277 and 283; 277 and 284; 277 and 285; 277 and 286; 277 and 287; 277 and 288; 277 and 289; 277 and 290; 277 and 291; 277 and 292; 278 and 279; 278 and 280; 278 and 281; 278 and 282; 278 and 283; 278 and 284; 278 and 285; 278 and 286; 278 and 287; 278 and 288; 278 and 289; 278 and 290; 278 and 291; 278 and 292; 279 and 280; 279 and 281; 279 and 282; 279 and 283; 279 and 284; 279 and 285; 279 and 286; 279 and 287; 279 and 288; 279 and 289; 279 and 290; 279 and 291; 279 and 292; 280 and 281; 280 and 282; 280 and 283; 280 and 284; 280 and 285; 280 and 286; 280 and 287; 280 and 288; 280 and 289; 280 and 290; 280 and 291; 280 and 292; 281 and 282; 281 and 283; 281 and 284; 281 and 285; 281 and 286; 281 and 287; 281 and 288; 281 and 289; 281 and 290; 281 and 291; 281 and 292; 282 and 283; 282 and 284; 282 and 285; 282 and 286; 282 and 287; 282 and 288; 282 and 289; 282 and 290; 282 and 291; 282 and 292; 283 and 284; 283 and 285; 283 and 286; 283 and 287; 283 and 288; 283 and 289; 283 and 290; 283 and 291; 283 and 292; 284 and 285; 284 and 286; 284 and 287; 284 and 288; 284 and 289; 284 and 290; 284 and 291; 284 and 292; 285 and 286; 285 and 287; 285 and 288; 285 and 289; 285 and 290; 285 and 291; 285 and 292; 286 and 287; 286 and 288; 286 and 289; 286 and 290; 286 and 291; 286 and 292; 287 and 288; 287 and 289; 287 and 290; 287 and 291; 287 and 292; 288 and 289; 288 and 290; 288 and 291; 288 and 292; 289 and 290; 289 and 291; 289 and 292; 290 and 291; 290 and 292; 291 and 292; 924 and 270; 924 and 272; 924 and 273; 924 and 274; 924 and 275; 924 and 276; 924 and 277; 924 and 278; 924 and 279; 924 and 280; 924 and 281; 924 and 282; 924 and 283; 924 and 284; 924 and 285; 924 and 286; 924 and 287; 924 and 288; 924 and 289; 924 and 290; 924 and 291; 924 and 292; 925 and 270; 925 and 272; 925 and 273; 925 and 274; 925 and 275; 925 and 276; 925 and 277; 925 and 278; 925 and 279; 925 and 280; 925 and 281; 925 and 282; 925 and 283; 925 and 284; 925 and 285; 925 and 286; 925 and 287; 925 and 288; 925 and 289; 925 and 290; 925 and 291; 925 and 292; 926 and 270; 926 and 272; 926 and 273; 926 and 274; 926 and 275; 926 and 276; 926 and 277; 926 and 278; 926 and 279; 926 and 280; 926 and 281; 926 and 282; 926 and 283; 926 and 284; 926 and 285; 926 and 286; 926 and 287; 926 and 288; 926 and 289; 926 and 290; 926 and 291; 926 and 292; 927 and 270; 927 and 272; 927 and 273; 927 and 274; 927 and 275; 927 and 276; 927 and 277; 927 and 278; 927 and 279; 927 and 280; 927 and 281; 927 and 282; 927 and 283; 927 and 284; 927 and 285; 927 and 286; 927 and 287; 927 and 288; 927 and 289; 927 and 290; 927 and 291; 927 and 292; 928 and 270; 928 and 272; 928 and 273; 928 and 274; 928 and 275; 928 and 276; 928 and 277; 928 and 278; 928 and 279; 928 and 280; 928 and 281; 928 and 282; 928 and 283; 928 and 284; 928 and 285; 928 and 286; 928 and 287; 928 and 288; 928 and 289; 928 and 290; 928 and 291; 928 and 292; 929 and 270; 929 and 272; 929 and 273; 929 and 274; 929 and 275; 929 and 276; 929 and 277; 929 and 278; 929 and 279; 929 and 280; 929 and 281; 929 and 282; 929 and 283; 929 and 284; 929 and 285; 929 and 286; 929 and 287; 929 and 288; 929 and 289; 929 and 290; 929 and 291; 929 and 292; 930 and 270; 930 and 272; 930 and 273; 930 and 274; 930 and 275; 930 and 276; 930 and 277; 930 and 278; 930 and 279; 930 and 280; 930 and 281; 930 and 282; 930 and 283; 930 and 284; 930 and 285; 930 and 286; 930 and 287; 930 and 288; 930 and 289; 930 and 290; 930 and 291; 930 and 292; 931 and 270; 931 and 272; 931 and 273; 931 and 274; 931 and 275; 931 and 276; 931 and 277; 931 and 278; 931 and 279; 931 and 280; 931 and 281; 931 and 282; 931 and 283; 931 and 284; 931 and 285; 931 and 286; 931 and 287; 931 and 288; 931 and 289; 931 and 290; 931 and 291; 931 and 292; 932 and 270; 932 and 272; 932 and 273; 932 and 274; 932 and 275; 932 and 276; 932 and 277; 932 and 278; 932 and 279; 932 and 280; 932 and 281; 932 and 282; 932 and 283; 932 and 284; 932 and 285; 932 and 286; 932 and 287; 932 and 288; 932 and 289; 932 and 290; 932 and 291; 932 and 292; 933 and 270; 933 and 272; 933 and 273; 933 and 274; 933 and 275; 933 and 276; 933 and 277; 933 and 278; 933 and 279; 933 and 280; 933 and 281; 933 and 282; 933 and 283; 933 and 284; 933 and 285; 933 and 286; 933 and 287; 933 and 288; 933 and 289; 933 and 290; 933 and 291; 933 and 292; 934 and 270; 934 and 272; 934 and 273; 934 and 274; 934 and 275; 934 and 276; 934 and 277; 934 and 278; 934 and 279; 934 and 280; 934 and 281; 934 and 282; 934 and 283; 934 and 284; 934 and 285; 934 and 286; 934 and 287; 934 and 288; 934 and 289; 934 and 290; 934 and 291; 934 and 292; 935 and 270; 935 and 272; 935 and 273; 935 and 274; 935 and 275; 935 and 276; 935 and 277; 935 and 278; 935 and 279; 935 and 280; 935 and 281; 935 and 282; 935 and 283; 935 and 284; 935 and 285; 935 and 286; 935 and 287; 935 and 288; 935 and 289; 935 and 290; 935 and 291; 935 and 292; 936 and 270; 936 and 272; 936 and 273; 936 and 274; 936 and 275; 936 and 276; 936 and 277; 936 and 278; 936 and 279; 936 and 280; 936 and 281; 936 and 282; 936 and 283; 936 and 284; 936 and 285; 936 and 286; 936 and 287; 936 and 288; 936 and 289; 936 and 290; 936 and 291; 936 and 292; 937 and 270; 937 and 272; 937 and 273; 937 and 274; 937 and 275; 937 and 276; 937 and 277; 937 and 278; 937 and 279; 937 and 280; 937 and 281; 937 and 282; 937 and 283; 937 and 284; 937 and 285; 937 and 286; 937 and 287; 937 and 288; 937 and 289; 937 and 290; 937 and 291; 937 and 292; 938 and 270; 938 and 272; 938 and 273; 938 and 274; 938 and 275; 938 and 276; 938 and 277; 938 and 278; 938 and 279; 938 and 280; 938 and 281; 938 and 282; 938 and 283; 938 and 284; 938 and 285; 938 and 286; 938 and 287; 938 and 288; 938 and 289; 938 and 290; 938 and 291; 938 and 292; 950 and 275; 951 and 275; 952 and 275; 953 and 275; 954 and 275; or 955 and 275;
[0375] k. For exon 44 with SluCas9: SEQ ID NOs: 200 and 203; 200 and 204; 202 and 203; 202 and 205; 202 and 206; 202 and 207; 204 and 208; 204 and 205; 204 and 206; 204 and 207; or 204 and 208;
[0376] l. For exon 45 with SluCas9, SEQ ID NOs: 223 and 230; or 224 and 212.
[0377] m. For exon 50 with SluCas9, SEQ ID NOs: 231 and 232; 231 and 234; 231 and 236; 231 and 237; 236 and 233; 236 and 235; 236 and 238; 236 and 240; or 236 and 241;
[0378] n. For exon 51 with SaCas9, SEQ ID NOs: 28 and 57; 31 and 57; 31 and 46; 32 and 69; 33 and 57; 33 and 69; 34 and 57; 36 and 69; 37 and 69; 37 and 46; 39 and 46; 40 and 46; 46 and 35; 46 and 62; 46 and 65; 46 and 67; 47 and 57; 48 and 57; 49 and 57; 51 and 57; 53 and 46; 54 and 46; 55 and 46; 58 and 46; 59 and 46; 60 and 46; 61 and 69; or 69 and 30;
[0379] o. For exon 51 with SluCas9, SEQ ID NOs: 243 and 252; 245 and 252; 252 and 253; 252 and 254; 252 and 256; 252 and 257; 252 and 258; 252 and 262; 252 and 264; 252 and 265; or 252 and 266;
[0380] p. For exon 53 with SaCas9, SEQ ID NOs: 86 and 96; 87 and 96; 88 and 97; 89 and 96; 90 and 97; 92 and 77; 92 and 78; 92 and 96; 92 and 99; 93 and 98; 93 and 102; 94 and 100; 95 and 77; 95 and 78; 95 and 99; 96 and 100; 97 and 98; 97 and 102; 98 and 73; or 102 and 73; and
[0381] q. For exon 53 with SluCas9, SEQ ID NOs: 278 and 290; 278 and 292; 281 and 291; 283 and 290; 283 and 292; 287 and 291; 272 and 290; 290 and 291; or 272 and 292.

[0382] In some embodiments, a method for treating DMD is provided comprising administering a composition comprising a Cas protein or a nucleic acid encoding a Cas protein and a pair of guide RNAs, wherein the pair of guide RNAs comprise or consist of any one of the pairs of guide sequences of any one of Tables 1B or 1D for exon 44, Tables 2B or 2D for exon 45, Tables 3B or 3D for exon 50, Tables 4B or 4D for exon 51, and Tables 5B or 5D for exon 53.

[0383] In some embodiments, a method for treating DMD is provided comprising administering a Cas protein or a nucleic acid encoding a Cas protein and a composition comprising one or more nucleic acid molecules encoding a pair of guide RNAs, wherein the pair of guide RNAs comprise or consist of one or more nucleic acid molecules encoding any one of the pairs of guide sequences of any one of Tables 1B or 1D for exon 44, Tables 2B or 2D for exon 45, Tables 3B or 3D for exon 50, Tables 4B or 4D for exon 51, and Tables 5B or 5D for exon 53.

[0384] In some embodiments, a method for treating DMD is provided comprising administering a Cas protein or a nucleic acid encoding a Cas protein and a composition comprising a pair of guide RNAs comprising or consisting of any one of the pairs of guide sequences of any one of the following:
[0385] a. For exon 44 with SluCas9, SEQ ID NOs: 200 and 203; 200 and 204; 202 and 203; 202 and 205; 202 and 206; 202 and 207; 204 and 208; 204 and 205; 204 and 206; 204 and 207; or 204 and 208;
[0386] b. For exon 45 with SluCas9, SEQ ID NOs: 223 and 230; or 224 and 212;
[0387] c. For exon 50 with SluCas9, SEQ ID NOs: 231 and 232; 231 and 234; 231 and 236; 231 and 237; 236 and 233; 236 and 235; 236 and 238; 236 and 240; or 236 and 241;
[0388] d. For exon 51 with SaCas9, SEQ ID NOs: 28 and 57; 31 and 57; 31 and 46; 32 and 69; 33 and 57; 33 and 69; 34 and 57; 36 and 69; 37 and 69; 37 and 46; 39 and 46; 40 and 46; 46 and 35; 46 and 62; 46 and 65; 46 and 67; 47 and 57; 48 and 57; 49 and 57; 51 and 57; 53 and 46; 54 and 46; 55 and 46; 58 and 46; 59 and 46; 60 and 46; 61 and 69; or 69 and 30;
[0389] e. For exon 51 with SluCas9, SEQ ID NOs: 243 and 252; 245 and 252; 252 and 253; 252 and 254; 252 and 256; 252 and 257; 252 and 258; 252 and 262; 252 and 264; 252 and 265; or 252 and 266;
[0390] f. For exon 53 with SaCas9, SEQ ID NOs: 86 and 96; 87 and 96; 88 and 97; 89 and 96; 90 and 97; 92 and 77; 92 and 78; 92 and 96; 92 and 99; 93 and 98; 93 and 102; 94 and 100; 95 and 77; 95 and 78; 95 and 99; 96 and 100; 97 and 98; 97 and 102; 98 and 73; or 102 and 73; and
[0391] g. For exon 53 with SluCas9, SEQ ID NOs: 278 and 290; 278 and 292; 281 and 291; 283 and 290; 283 and 292; 287 and 291; 272 and 290; 290 and 291; or 272 and 292.

[0392] In some embodiments, a method for treating DMD is provided comprising administering a Cas protein or a nucleic acid encoding a Cas protein and a composition comprising one or more nucleic acid molecules encoding a pair of guide RNAs, wherein the pair of guide RNAs comprise or consist of one or more nucleic acid molecules encoding any one of the pairs of guide sequences of any one of the following:
[0393] a. For exon 44 with SluCas9, SEQ ID NOs: 200 and 203; 200 and 204; 202 and 203; 202 and 205; 202 and 206; 202 and 207; 204 and 208; 204 and 205; 204 and 206; 204 and 207; or 204 and 208;
[0394] b. For exon 45 with SluCas9, SEQ ID NOs: 223 and 230; or 224 and 212.
[0395] c. For exon 50 with SluCas9, SEQ ID NOs: 231 and 232; 231 and 234; 231 and 236; 231 and 237; 236 and 233; 236 and 235; 236 and 238; 236 and 240; or 236 and 241;
[0396] d. For exon 51 with SaCas9, SEQ ID NOs: 28 and 57; 31 and 57; 31 and 46; 32 and 69; 33 and 57; 33 and 69; 34 and 57; 36 and 69; 37 and 69; 37 and 46; 39 and 46; 40 and 46; 46 and 35; 46 and 62; 46 and 65; 46 and 67; 47 and 57; 48 and 57; 49 and 57; 51 and 57; 53 and 46; 54 and 46; 55 and 46; 58 and 46; 59 and 46; 60 and 46; 61 and 69; or 69 and 30;
[0397] e. For exon 51 with SluCas9, SEQ ID NOs: 243 and 252; 245 and 252; 252 and 253; 252 and 254; 252 and 256; 252 and 257; 252 and 258; 252 and 262; 252 and 264; 252 and 265; or 252 and 266;
[0398] f. For exon 53 with SaCas9, SEQ ID NOs: 86 and 96; 87 and 96; 88 and 97; 89 and 96; 90 and 97; 92 and 77; 92 and 78; 92 and 96; 92 and 99; 93 and 98; 93 and 102; 94 and 100; 95 and 77; 95 and 78; 95 and 99; 96 and 100; 97 and 98; 97 and 102; 98 and 73; or 102 and 73; and
[0399] g. For exon 53 with SluCas9, SEQ ID NOs: 278 and 290; 278 and 292; 281 and 291; 283 and 290; 283 and 292; 287 and 291; 272 and 290; 290 and 291; or 272 and 292.

[0400] In some embodiments, a method for treating DMD further comprises administering a nucleic acid encoding an endonuclease. The appropriate endonuclease for use with each of the guide RNAs is provided herein, for example, in Table 6, column “enzyme.”

[0401] In some embodiments, the subject is a mammal. In some embodiments, the subject is human.

[0402] For treatment of a subject (e.g., a human), any of the compositions disclosed herein may be administered in a manner compatible with the dosage formulation and in such amount as is therapeutically effective. The compositions may be readily administered in a variety of dosage forms, such as injectable solutions. For parenteral administration in an aqueous solution, for example, the solution will generally be suitably buffered and the liquid diluent first rendered isotonic with, for example, sufficient saline or glucose. Such aqueous solutions may be used, for example, for intravenous, intramuscular, subcutaneous, and/or intraperitoneal administration.

### Combination Therapy

[0403] In some embodiments, the invention comprises combination therapies comprising any of the methods or uses described herein together with an additional therapy suitable for ameliorating DMD.

### Delivery of Guide RNA Compositions

[0404] The methods and uses disclosed herein may use any suitable approach for delivering the guide RNAs and compositions described herein. Exemplary delivery approaches include vectors, such as viral vectors; lipid nanoparticles; transfection; and electroporation. In some embodiments, vectors or LNPs associated with the single-vector guide RNAs/Cas9's disclosed herein are for use in preparing a medicament for treating DMD.

[0405] Lipid nanoparticles (LNPs) are a known means for delivery of nucleotide and protein cargo, and may be used for delivery of the guide RNAs, compositions, or pharmaceutical formulations disclosed herein. In some embodiments, the LNPs deliver nucleic acid, protein, or nucleic acid together with protein.

[0406] Electroporation is a well-known means for delivery of cargo, and any electroporation methodology may be used for delivering the single vectors disclosed herein.

[0407] In some embodiments, the invention comprises a method for delivering any one of the single vectors disclosed herein to an ex vivo cell, wherein the guide RNA is encoded by a vector, associated with an LNP, or in aqueous solution. In some embodiments, the guide RNA/LNP or guide RNA is also associated with a Cas9 or sequence encoding Cas9 (e.g., in the same vector, LNP, or solution).

[0408] In some embodiments, the disclosure provides for methods of using any of the guides, endonucleases, cells, or compositions disclosed herein in research methods. For example, any of the guides or endonucleases disclosed herein may be used alone or in combination in experiments under various parameters (e.g., temperatures, pH, types of cells) or combined with other reagents to evaluate the activity of the guides and/or endonucleases.

### EXAMPLES

[0409] The following examples are provided to illustrate certain disclosed embodiments and are not to be construed as limiting the scope of this disclosure in any way.

### Example 1: Exemplary DMD sgRNAs

[0410] Guide RNA comprising the guide sequences shown in Table 6 were prepared according to standard methods in a single guide (sgRNA) format. A single AAV vector, or two AAV vectors, were prepared that expresses one or more of the guide RNAs and a SaCas9 (for guide sequences having SEQ ID NOs: 1-159) or SluCas9 (for guide sequences having SEQ ID NOs: 200-292, 924-938, or 950-955). The AAV vector was administered to cells in vitro to assess the ability of the AAV to express the guide RNA and Cas9, edit the targeted exon (see Table 6), and thereby treat DMD.

### Example 2: Evaluation of sgRNA Pairs

### A. Materials and Methods

1. sgRNA Selection

[0411] A subset of SaCas9-KKH or SluCas9 sgRNAs found within the DMD gene was selected for indel frequency and profile evaluation. The selected sgRNAs for pair evaluation are shown in Table 6 and were prepared according to standard methods. The criteria used to select these sgRNAs included their potential to induce exon refraining and or skipping as a pair, in addition to the existence of a mouse, dog and NHP homologue counterpart. This selection included 4 sgRNAs located within exon 45, 43 sgRNAs located within exon 51 and 29 sgRNAs located within exon 53. The number of predicted off target sites was determined for each sgRNA.

### 2. Human Primary Skeletal Muscle Myoblasts (HsMMs) Culture

[0412] On day one, frozen vials of HsMMs (lot 20TL070666 for FIGS. 2, 6, and 7A; lot 18TL269121 for FIG. 7B) were thawed and grown in complete growth media in a 37° C., 5% CO₂, humidified incubator in T75 flasks. On day two, the growth media was renewed. On day three, the cells were passaged into T150 flasks. On day five, the media in each flask were changed. On day 6, the cells were harvested and electroporated with RNP (nucleofection).

### 3. Nucleofection of HsMM Cells

[0413] The selected sgRNAs for pair evaluation are shown in Tables 1A-1D and 2 and were chemically synthesized (Sythego). The Cas9 nuclease is recombinant purified SluCas9 (Aldevron). HsMM cells were nucleofected with RNP using the Lonza 4D nucleofector. For each sample, formulated RNP and 0.3×10⁶ cells were mixed in P5 solution. For dual-cut samples that contain two gRNAs, two separate RNPs were formulated with either gRNA of the pair. To formulate RNPs, the gRNA and protein were incubated for about 20 minutes at room temperature. For the experiment shown in FIG. 2, the RNPs were prepared in a 3:1 gRNA:Cas9 ratio at 18.75 pmols of sgRNA and of 6.25 pmols of Cas9; total of 37.5 pmols of RNA component and 12.5 pmols of Cas9 component. For the experiment shown in FIG. 6, the RNPs were prepared in a 6:1 gRNA:Cas9 ratio at 18.75 pmols of sgRNA and of 3.125 pmols of Cas9; total of 37.5 pmols of RNA component and 6.25 pmols of Cas9 component. For the experiment shown in FIG. 7, the RNPs were prepared in a 6:1 gRNA:Cas9 ratio at three different total RNP doses: i) high dose (H) at 75 pmol of sgRNA with 12.5 pmols of Cas9, ii) medium dose (M) at 37.5 pmol of sgRNA with 6.25 pmol of Cas9, and iii) low dose (L) 18.75 pmols of sgRNA and of 3.125 pmols of Cas9. For dual RNP nucleofections (FIG. 7), the total RNP dose reflects the sum of each RNP, e.g., high dose includes 37.5 pmols of sgRNA-1, 6.25 pmol Cas9 as RNP1, 37.5 pmols of sgRNA-2, and 6.25 pmol Cas9 as RNP2. After electroporation, 80 μL of complete growth media was added to each sample and samples were incubated in a 37° C., 5% CO², humidified incubator for 10 minutes. After this recovery, the samples were transferred to 12-well plates containing 2 mL of complete growth media that had been previously equilibrated in a 37° C., 5% CO², humidified incubator.

4. Cell Harvesting and gDNA Extraction

[0414] To determine cell viability 48 hours after nucleofection, the cells were stained with Hoechst and Propidium Iodide (Life Technologies). Cell viability was then assessed using ImageXpress Micro (Molecular Devices). In general, samples with an overall cell viability above 80% were harvested and analyzed for indel analysis. To isolate genomic DNA from HsMMs, the cells were washed with saline buffer, trypsinized and centrifuged. The cell pellets were treated with lysis buffer from the Maxwell RSC Blood DNA Kit (Promega #AS1400), and genomic DNAs were extracted using a Maxwell® RSC48 instrument (Promega #AS8500) according to the manufacturer's instruction. The concentrations of genomic DNAs were determined using Qubit™ 1×dsDNA HS Assay Kit (Thermo Fisher Scientific Q33231) according to the manufacturer's instruction.

### 5. Sequencing Analysis

[0415] For the data in FIGS. 6-8 and 10, the editing outcomes from the sequencing data were characterized computationally. Indel frequencies at the cut site were tabulated using the reference amplicon sequence, protospacer sequence, cleavage offset, and the size of the quantification window centered around the cut site.

[0416] A stringent set of QC criteria was applied to filter poor quality samples. These criteria included:
[0417] Average base quality in the sample
[0418] Minimum fraction of reads that are of high sequencing quality
[0419] Minimum fraction of reads with a minimum read length post-trimming
[0420] Minimum fraction of reads remaining after decontamination (i.e., removing phiX reads)
[0421] Minimum fraction of reads that successfully merged
[0422] Minimum fraction of reads that successfully aligned
[0423] Minimum number of aligned reads

[0424] For samples passing all QC criteria, indels identified were classified into three expected types of indels:
[0425] Precise dual-cut: Edits that properly reframe the transcript resulting from the expected cuts from both gRNAs.
[0426] Refraining edits: Indels other than precise dual-cut that properly reframe the transcript.
[0427] Other edits: Indels that do not properly reframe the transcript.
   6. For Each Sample, Total % Editing and % Editing for Each Type of Expected Indels (Precise Dual-Cut, Reframing Edits, Other Edits) were Reported. Transfection of HEK293FT Cells

[0428] To evaluate indel frequency and profile, human HEK293FT cell line was used. HEK293FT cells were transfected in 12-well plates with 750 ng plasmid+2.5 μL of Lipofectamine 2000. Three days after transfection, cells were trypsinized and sorted for green fluorescent protein (GFP). GFP-positive cells were sorted directly into lysis buffer, and DNA extraction was performed for exon 51 using the Maxwell RSC Blood DNA Kit (Promega #AS1400) and using a Maxwell@RSC48 instrument (Promega #AS8500) according to the manufacturer's instruction. PCR was then performed on the genomic DNA using DMD exon 53-specific primers that targeted the relevant cut site.

### 7. Amplicon Deep Sequencing Library Preparation and Data Analysis

[0429] For the data in FIGS. 1-3, Exon 53 or 51 was amplified by PCR and the products were used to prepare sequencing libraries using MiSeq reagent kit V3. Indel analysis was performed using CRISPResso2±10-nt quantification window. (See, e.g., Clement et al., Nat Biotechnol. 2019 March; 37(3):224-226). Indel profiling consisted of six mutually exclusive indel categories, described below:
[0430] NE: non-edited;
[0431] Precise deletion (i.e. CleanCut);
[0432] RF.+1 (i.e. +1 bp): 1-nucleotide (nt) insertion leading to reframe;
[0433] RF. Other (i.e. Reframe): indels other than 1-nt insertion leading to reframe:
[0434] Deletion: not extending outside of the refraining window
[0435] Insertion: <17-nt (i.e., <6 amino acids);
[0436] Exon skipping: indels that disrupt the ±6-nt window of the exon/intron boundaries leading to potential exon skipping (outcome requiring validation):
[0437] The indel has >=9-nt overlap with the splicing window (to disrupt the GT/AG splicing sites)
[0438] OE: Other indels.

[0439] The following sequences of selected primers were used for amplification of the specific human locus containing the sgRNA targeting sites (Tables 8A-8B)

TABLE 8A
Primers for Amplification (Human)

| Targeting | Primer | |
|---|---|---|
| exon | ID | Sequence |
| 53 | hEX53_F1 | AAATGTGAGATAACGTTTGGAAG |
| | | (SEQ ID NO: 804) |
| | hEX53_R1 | TTTCAGCTTTAACGTGATTTTCT |
| | | G (SEQ ID NO: 805) |

TABLE 8B
Primer + MiSeq Adapter Sequence (Human)

| Exon | ID | Sequence |
|---|---|---|
| 53 | MiSeq_hEX53_F1 | TCGTCGGCAGCGTCAGATGTGTATAAGA |
| | | GACAGAAATGTGAGATAACGTTTGGAAG |
| | | (SEQ ID NO: 810) |
| | MiSeq_hEX53_R1 | GTCTCGTGGGCTCGGAGATGTGTATAAG |
| | | AGACAGTTTCAGCTTTAACGTGATTTTC |
| | | TG (SEQ ID NO: 811) |

### 8. AAV Configurations for the Dual Cut Single Vector Candidates

[0440] A combination of promoter orientations, promoter configurations, NLSs and scaffolds were selected for generating AAV plasmids and evaluation on sgRNA transgene expression, AAV manufacturability, and editing efficiency in vitro and in vivo. AAV plasmid configurations are listed in Table 9.

TABLE 9

| Pol III | | | | | | | |
|---|---|---|---|---|---|---|---|
| Promoter | Orientation | Configuration | NLS1 | Endonuclease | NLS2 | NLS3 | Scaffold |
| hU6c:hU6c | ← [symbol] [symbol] | hU6c-Cas9- | c-Myc- | SluCas9 | SV-40-GSGS | Nucleoplasmin- | V5 |
| | | hU6c | GSVD | | | GSGS | |
| | ← [symbol] [symbol] | hU6c-Cas9- | c-Myc- | SaCas9-KKH | SV-40-GSGS | Nucleoplasmin- | V2 |
| | | hU6c | GSVD | | | GSGS | |
| | ← [symbol] [symbol] | hU6c-Cas9- | c-Myc- | SluCas9 | SV-40-MCS- | Nucleoplasmin- | V5 |
| | | hU6c | GSVD | | GSGS | GSGS | |
| | ← [symbol] [symbol] | hU6c-Cas9- | c-Myc- | SaCas9-KKH | SV-40-MCS- | Nucleoplasmin- | V2 |
| | | hU6c | GSVD | | GSGS | GSGS | |
| hU6:7SK2 | ← [symbol] [symbol] | hU6c-Cas9- | c-Myc- | SluCas9 | SV-40-GSGS | Nucleoplasmin- | V5 |
| | | 7SK2 | GSVD | | | GSGS | |
| | ← [symbol] [symbol] | hU6c-Cas9- | c-Myc- | SaCas9-KKH | SV-40-GSGS | Nucleoplasmin- | V2 |
| | | 7SK2 | GSVD | | | GSGS | |
| | ← [symbol] [symbol] | hU6c-Cas9- | c-Myc- | SluCas9 | SV-40-MCS- | Nucleoplasmin- | V5 |
| | | 7SK2 | GSVD | | GSGS | GSGS | |
| | ← [symbol] [symbol] | hU6c-Cas9- | c-Myc- | SaCas9-KKH | SV-40-MCS- | Nucleoplasmin- | V2 |
| | | 7SK2 | GSVD | | GSGS | GSGS | |
| hU6c:H1m | ← [symbol] [symbol] | hU6c-Cas9- | c-Myc- | SluCas9 | SV-40-GSGS | Nucleoplasmin- | V5 |
| | | H1m | GSVD | | | GSGS | |
| | ← [symbol] [symbol] | hU6c-Cas9- | c-Myc- | SaCas9-KKH | SV-40-GSGS | Nucleoplasmin- | V2 |
| | | H1m | GSVD | | | GSGS | |
| 7SK2:H1m | ← [symbol] [symbol] | 7SK2-Cas9- | SV-40-GS | SluCas9 | Nucleoplasmin | N/A | V5 |
| | | Hlm | | | | | |
| | ← [symbol] [symbol] | 7SK2-Cas9- | SV-40-GS | SaCas9-KKH | Nucleoplasmin | N/A | V2 |
| | | H1m | | | | | |
| | ← [symbol] [symbol] | 7SK2-Cas9- | SV-40 (+) | SluCas9 | Nucleoplasmin | N/A | V5 |
| | | H1m | | | | | |
| | ← [symbol] [symbol] | 7SK2-Cas9- | SV-40 (+) | SaCas9-KKH | Nucleoplasmin | N/A | V2 |
| | | H1m | | | | | |
| | ← [symbol] [symbol] | 7SK2-Cas9- | c-Myc- | SluCas9 | SV-40-MCS- | Nucleoplasmin- | V5 |
| | | H1m | GSVD | | GSGS | GSGS | |
| | ← [symbol] [symbol] | 7SK2-Cas9- | c-Myc- | SaCas9-KKH | SV-40-MCS- | Nucleoplasmin- | V2 |
| | | H1m | GSVD | | GSGS | GSGS | |
| | ← [symbol] [symbol] | 7SK2-Cas9- | c-Myc- | SluCas9 | SV-40-MCS- | Nucleoplasmin- | V2 |
| | | H1m | GSVD | | GSGS | GSGS | |
| H1m:M11 | ← [symbol] [symbol] | H1m-Cas9- | c-Myc- | SluCas9 | SV-40-MCS- | Nucleoplasmin- | V5 |
| | | M11 | GSVD | | GSGS | GSGS | |
| | ← [symbol] [symbol] | H1m-Cas9- | c-Myc- | SaCas9-KKH | SV-40-MCS- | Nucleoplasmin- | V5 |
| | | M11 | GSVD | | GSGS | GSGS | |

[0441] Sequences of selected primers used for amplification of the specific human locus containing the sgRNA sites are shown in Table 10.

TABLE 10

| Name | Sequence |
|---|---|
| MiSeq_hE45_F | TCGTCGGCAGCGTCAGATGTGTATAAGAGACAGGTCTTTCTGTCTTGTATCCTTTGG |
| | (SEQ ID NO: 724) |
| MiSeq_hE45_R | GTCTCGTGGGCTCGGAGATGTGTATAAGAGACAGAATGTTAGTGCCTTTCACCC |
| | (SEQ ID NO: 725) |
| TIDE_hE45_F* | GTCTTTCTGTCTTGTATCCTTTGG (SEQ ID NO: 726) |

*TIDE_hE45_F is used for Sanger sequencing.

### 9. Results

[0442] A set of sgRNAs found within the DMD gene was selected for evaluation of indel frequency and profile. Among this selection, 4 sgRNAs were located within exon 45, 43 sgRNAs were located within exon 51 and 29 sgRNAs were located within exon 53.

[0443] To evaluate indel frequency and editing profiles, plasmid transfection was performed in HEK293FT (FIGS. 1, 3), and Human Skeletal Muscle Myoblasts (HsMM) (FIG. 2A-B).

[0444] The editing frequency and indel profile of selected SaCas9, SaCas9-KKH and SluCas9 sgRNA pairs targeting Exon 51 of DMD gene was determined, as shown in FIG. 1. Each stack bar represents a sgRNA pair and the bar height depicts the average frequency of the total edit. Different indel profiles for each pair of sgRNAs are represented by using distinct patterns. Error bars denote the standard deviation for each indel group.

[0445] The average indel frequency of sgRNAs targeting exon 51 of the DMD gene was determined in HEK294FT cells (FIG. 1), including precise deletions. The deletion size is shown at bottom.

[0446] The average indel frequency of sgRNAs targeting Exon 45 or Exon 51 of the DMD gene was determined in HsMM cells (FIG. 2A-B) as calculated by Inference of CRISPR Edit (ICE) via Sanger sequencing signal decomposition (FIG. 2A) and next generation sequencing (NGS) (FIG. 2B).

[0447] The average indel frequency of sgRNAs targeting exon 45 (left) and exon 53 (right) of the DMD gene was determined in HEK294FT cells (FIG. 3), including precise deletions. The deletion size is shown at bottom.

[0448] Using a different formulation (see Materials and Methods: Nucleofection of HsMM cells, above), the average indel frequency of sgRNAs targeting Exon 51 of the DMD gene was again determined in HsMM cells (FIGS. 6A-B) as calculated by next generation sequencing (NGS). Based on these results, the following guide pairs were selected for additional characterization: Slu31-Slu5 (SEQ ID NOs: 269 and 247), Slu31-Slu7 (SEQ ID NOs: 269 and 249), Slu10-24 (SEQ ID NOs: 252 and 262), Slu10-26 (SEQ ID NOs: 252 and 264), and Slu10-16 (SEQ ID NOs: 252 and 254).

[0449] Nuclease activity of the selected guide pairs was evaluated as a function of dose (FIGS. 7A-B). The results show that Slu31-Slu5 (SEQ ID NOs: 269 and 247) (FIG. 7A) generated the highest precise deletion levels of the selected guide pairs, followed by Slu10-Slu16 (SEQ ID NOs: 252 and 254) (FIG. 7B).

[0450] The robustness of the precise deletion regime was evaluated in response to perturbations in RNP stoichiometry (FIGS. 8A-B). The dual cut system appeared more robust for the E51Slu10 (SEQ ID NO: 252) dilution than the E51Slu16 (SEQ ID NO: 254) dilution, suggesting that an AAV configuration with Slu16-Slu10 may be more efficacious at lower doses than several of the other pairs tested. (FIG. 8A). The dual cut system displayed equal robustness for the dilution of either E51Slu10 or E51Slu26 (SEQ ID NO: 264) (FIG. 8B).

### Example 3: Pair Selection for Exon 44 and Exon 50

### A. Materials and Methods

[0451] To obtain exemplary guide pairs for exon 44 and exon 50, the refraining window was detected. The refraining window for exon 44 and 50 was defined as the region in which a change in frame would not induce a premature stop codon. The refraining window was calculated by searching premature stop codons in the mutant exon sequence, which was generated by omitting the first base of the exon sequence. Since exon 44 was not in the neutral frame, the searching was conducted from the beginning of exon 43. The window between last premature stop codon and the end of the exon was then determined as the refraining window. Pairs of guide RNAs were then located where the cut-site of at least one guide RNA was within the refraining window. The candidate clean-cut pairs that refrained the exon to a desired frame were a subset of guides for which the cut-distance between the two guides can be represented by the expression “3n+2”. An exemplary reframe is shown in FIGS. 4A and B.

### Example 4: Exon 53 HEK239FT sRGN On-Target Screening

### A. Materials and Methods

### 1. Transfection of HEK293FT Cells

[0452] To evaluate indel frequency and profile, human HEK293FT cell lines were used. About 200 k HEK293FT cells were seeded and transfected in each well of 12-well plates, with 750 ng plasmid+2.5 μL of Lipofectamine 2000 per well. Each plasmid expressed the appropriate nuclease and two sgRNAs for dual-cut editing. The Slu_v5 scaffold (SEQ ID NO: 901) was used for all samples, except for one triplicate of a E45Slu18/4 sample. Three days after transfection, cells were trypsinized and sorted for green fluorescent protein (GFP). About 100 k GFP-positive cells were sorted directly into lysis buffer, and DNA extraction was performed using the Maxwell RSC Blood genomic DNA purification kit.

### 2. Amplicon Deep Sequencing, Library Preparation, and Data Analysis

[0453] To determine the gene editing efficiency, the genomic DNAs were amplified using primers flanking the DMD exon 53 genomic region. The following primer sequences were used: hEX53_F1 AAATGTGAGATAACGTTTGGAAG (SEQ ID NO: 804) and hEX53_R1 TTTCAGCTTTAACGTGATTTTCTG (SEQ ID NO: 805). The size of the amplicons was verified by analyzing a small amount of the PCR products on 2% E-gels. The PCR product was purified by AMPure XP beads. The purified PCR product was amplified again with primers that contain barcodes and Illumina adaptors: i5_UDP0003 AATGATACGGCGACCACCGAGATCTACACTATAGTAGCTTCGTCGGCAGCGTC (SEQ ID NO: 921), and variable i7 indexing primers CAAGCAGAAGACGGCATACGAGAT[variable_10nt i7_barcode]GTCTCGTGGGCTCGG (CAAGCAGAAGACGGCATACGAGATNNNNNNNNNNGTCTCGTGGGCTCGG, SEQ ID NO: 922). Multiple barcoded samples were pooled, combined with PhiX library, and loaded onto the Illumina Mi-Seq platform. MiSeq Reagent Kit v3 was used to produce a 600-cycle run.

[0454] Indel analysis was performed using CRISPResso2±10-nt quantification window. (See, e.g., Clement et al., Nat Biotechnol. 2019 March; 37(3):224-226). Indel profiling was assessed using the mutually exclusive indel categories below:
[0455] a) Precise Deletion: precision deletion of the DNA sequence between the predicted cut sites of the sgRNA pairs, which leads to reframe;
[0456] b) RF. Other: indels other than precise deletion leading to reframe:
[0457] c) OE: Other indels.

### 3. Results

[0458] Results of the Exon 53 HEK293FT sRGN on-target screening are shown in FIGS. 9-11. As shown in FIG. 10, the three sRGNs tested (3.1, 3.3, and 4) had higher % precise deletions than SluCas9 for Slu14+7 (SEQ ID NOs: 281 and 275, respectively), Slu 16+23 (SEQ ID NOS: 283 and 290, respectively) and Slu3+7 (SEQ ID NOs: 271 and 275, respectively). Additionally, sRGN3.3 E53SL3+7 showed the highest % precise deletions (67.8%). For each guide pair, sRGN3.3 had the highest % precise deletions.

### Example 5: Exon 53 HsMM sRGN On-Target Screening

### A. Materials and Methods

### 1. Transfection of HsMM Cells

[0459] To evaluate indel frequency and profile, primary human skeletal muscle myoblast (HsMM donor number 20TL356515, Lonza) cells were used. Nucleases were delivered as capped mRNA with N1-methylpseudouridine substitutions, produced through in vitro transcription by GenScript. sgRNAs were delivered as modified ssRNA synthesized by Synthego. About 50,000 HsMM cells were seeded and transfected in each well of 12-well plates. In each well, 3000 ng plasmid+0.5 μL of 12.5 M of each sgRNA were added along with Lipofectamine messengerMAX transfection reagent. The Slu_v5 scaffold (SEQ ID NO: 901) was used for all sgRNAs. Two days after transfection, cells were trypsinized, and genomic DNA extraction was performed using the Maxwell RSC Blood genomic DNA purification kit.

### 2. Amplicon Deep Sequencing, Library Preparation, and Data Analysis

[0460] To determine the gene editing efficiency, the genomic DNAs were amplified using primers flanking the DMD exon 53 genomic region. The following primer sequences were used: hEX53_F1 AAATGTGAGATAACGTTTGGAAG (SEQ ID NO: 804) and hEX53_R1 TTTCAGCTTTAACGTGATTTTCTG (SEQ ID NO: 805). The size of the amplicons was verified by analyzing a small amount of the PCR products on 2% E-gels. The PCR product was purified using AMPure XP beads. The purified PCR product was amplified again with primers that contain barcodes and Illumina adaptors: i5_UDP0003 AATGATACGGCGACCACCGAGATCTACACTATAGTAGCTTCGTCGGCAGCGTC (SEQ ID NO: 921), and variable i7 indexing primers CAAGCAGAAGACGGCATACGAGAT[variable_10nt_i7_barcode]GTCTCGTGGGCTCGG (CAAGCAGAAGACGGCATACGAGATNNNNNNNNNNGTCTCGTGGGCTCGG, SEQ ID NO: 922). Multiple barcoded samples were pooled, combined with PhiX library, and loaded onto the Illumina Mi-Seq platform. MiSeq Reagent Kit v3 was used to produce a 600-cycle run.

[0461] Indel analysis was performed using CRISPResso2±10-nt quantification window (See Clement et al., Nat Biotechnol. 2019 March; 37(3):224-226). Indel profiling was assessed using the mutually exclusive indel categories below:
[0462] a) Precise Deletion: precision deletion of the DNA sequence between the predicted cut sites of the sgRNA pairs, which leads to reframe;
[0463] b) RF. Other: indels other than precise deletion leading to reframe:
[0464] c) OE: Other indels.

### 3. Results

[0465] Results of the Exon 53 HsMM sRGN on-target screening are shown in FIG. 12. The three sRGNs tested (3.1, 3.3, and 4) exhibited higher % precise deletions than SluCas9 for both Slu16+23 (SEQ ID NOs: 283 and 290, respectively) and Slu3+7 (SEQ ID NOs: 271 and 275, respectively), with increases in % precise deletions greatest for the three sRGNs with Slu16+23 as compared to SluCas9 with Slu16+23.

[0466] This description and exemplary embodiments should not be taken as limiting. For the purposes of this specification and appended claims, unless otherwise indicated, all numbers expressing quantities, percentages, or proportions, and other numerical values used in the specification and claims, are to be understood as being modified in all instances by the term “about,” to the extent they are not already so modified. Accordingly, unless indicated to the contrary, the numerical parameters set forth in the following specification and attached claims are approximations that may vary depending upon the desired properties sought to be obtained. At the very least, and not as an attempt to limit the application of the doctrine of equivalents to the scope of the claims, each numerical parameter should at least be construed in light of the number of reported significant digits and by applying ordinary rounding techniques.

[0467] It is noted that, as used in this specification and the appended claims, the singular forms “a,” “an,” and “the,” and any singular use of any word, include plural referents unless expressly and unequivocally limited to one referent. As used herein, the term “include” and its grammatical variants are intended to be non-limiting, such that recitation of items in a list is not to the exclusion of other like items that can be substituted or added to the listed items.

The application's sequence listing, which the Patent Office published only in electronic form, follows.

SEQUENCE LISTING (9021 sequences)

SEQ ID NO: 1 - DNA, 22 bp, synthetic construct
  misc_feature 1..22: note = Synthetic
  source 1..22: mol_type = other DNA
atttagcatgttcccaattctc

SEQ ID NO: 2 - DNA, 22 bp, synthetic construct
  misc_feature 1..22: note = Synthetic
  source 1..22: mol_type = other DNA
tctcagaaagacacaaattcct

SEQ ID NO: 3 - DNA, 22 bp, synthetic construct
  misc_feature 1..22: note = Synthetic
  source 1..22: mol_type = other DNA
tcaggcttcccaatttttcctg

SEQ ID NO: 4 - DNA, 22 bp, synthetic construct
  misc_feature 1..22: note = Synthetic
  source 1..22: mol_type = other DNA
tagaatactggcatctgttttt

SEQ ID NO: 5 - DNA, 22 bp, synthetic construct
  misc_feature 1..22: note = Synthetic
  source 1..22: mol_type = other DNA
tggcatctgtttttgaggattg

SEQ ID NO: 6 - DNA, 22 bp, synthetic construct
  misc_feature 1..22: note = Synthetic
  source 1..22: mol_type = other DNA
ttgccgctgcccaatgccatcc

SEQ ID NO: 7 - DNA, 22 bp, synthetic construct
  misc_feature 1..22: note = Synthetic
  source 1..22: mol_type = other DNA
tctacaggaaaaattgggaagc

SEQ ID NO: 8 - DNA, 22 bp, synthetic construct
  misc_feature 1..22: note = Synthetic
  source 1..22: mol_type = other DNA
gcggcaaactgttgtcagaaca

SEQ ID NO: 9 - DNA, 22 bp, synthetic construct
  misc_feature 1..22: note = Synthetic
  source 1..22: mol_type = other DNA
ttttggtatcttacaggaactc

SEQ ID NO: 10 - DNA, 22 bp, synthetic construct
  misc_feature 1..22: note = Synthetic
  source 1..22: mol_type = other DNA
aggaagttagaagatctgagct

SEQ ID NO: 11 - DNA, 22 bp, synthetic construct
  misc_feature 1..22: note = Synthetic
  source 1..22: mol_type = other DNA
tagtaaccacaggttgtgtcac

SEQ ID NO: 12 - DNA, 22 bp, synthetic construct
  misc_feature 1..22: note = Synthetic
  source 1..22: mol_type = other DNA
gttgtgtcaccagagtaacagt

SEQ ID NO: 13 - DNA, 22 bp, synthetic construct
  misc_feature 1..22: note = Synthetic
  source 1..22: mol_type = other DNA
gagggtgatggtgggtgacctt

SEQ ID NO: 14 - DNA, 22 bp, synthetic construct
  misc_feature 1..22: note = Synthetic
  source 1..22: mol_type = other DNA
tataaaatcacagagggtgatg

SEQ ID NO: 15 - DNA, 22 bp, synthetic construct
  misc_feature 1..22: note = Synthetic
  source 1..22: mol_type = other DNA
ttgatcaagttataaaatcaca

SEQ ID NO: 16 - DNA, 22 bp, synthetic construct
  misc_feature 1..22: note = Synthetic
  source 1..22: mol_type = other DNA
ccttggtttctgtgattttctt

SEQ ID NO: 17 - DNA, 22 bp, synthetic construct
  misc_feature 1..22: note = Synthetic
  source 1..22: mol_type = other DNA
tccttagcttccagccattgtg

SEQ ID NO: 18 - DNA, 22 bp, synthetic construct
  misc_feature 1..22: note = Synthetic
  source 1..22: mol_type = other DNA
cttgtacttcatcccactgatt

SEQ ID NO: 19 - DNA, 22 bp, synthetic construct
  misc_feature 1..22: note = Synthetic
  source 1..22: mol_type = other DNA
actgattctgaattctttcaac

SEQ ID NO: 20 - DNA, 22 bp, synthetic construct
  misc_feature 1..22: note = Synthetic
  source 1..22: mol_type = other DNA
agccaagcttgagtcatggaag

SEQ ID NO: 21 - DNA, 22 bp, synthetic construct
  misc_feature 1..22: note = Synthetic
  source 1..22: mol_type = other DNA
ttaggacaggccagagccaagc

SEQ ID NO: 22 - DNA, 22 bp, synthetic construct
  misc_feature 1..22: note = Synthetic
  source 1..22: mol_type = other DNA
gcaacagttgaatgaaatgtta

SEQ ID NO: 23 - DNA, 22 bp, synthetic construct
  misc_feature 1..22: note = Synthetic
  source 1..22: mol_type = other DNA
ccttcagaaccggaggcaacag

SEQ ID NO: 24 - DNA, 22 bp, synthetic construct
  misc_feature 1..22: note = Synthetic
  source 1..22: mol_type = other DNA
agttgaaagaattcagaatcag

SEQ ID NO: 25 - DNA, 22 bp, synthetic construct
  misc_feature 1..22: note = Synthetic
  source 1..22: mol_type = other DNA
ttttattctagttgaaagaatt

SEQ ID NO: 26 - DNA, 22 bp, synthetic construct
  misc_feature 1..22: note = Synthetic
  source 1..22: mol_type = other DNA
tttttccttttattctagttga

SEQ ID NO: 27 - DNA, 22 bp, synthetic construct
  misc_feature 1..22: note = Synthetic
  source 1..22: mol_type = other DNA
tcattttttctcataccttctg

SEQ ID NO: 28 - DNA, 22 bp, synthetic construct
  misc_feature 1..22: note = Synthetic
  source 1..22: mol_type = other DNA
ttttttctcataccttctgctt

SEQ ID NO: 29 - DNA, 22 bp, synthetic construct
  misc_feature 1..22: note = Synthetic
  source 1..22: mol_type = other DNA
ccttctgcttgatgatcatctc

SEQ ID NO: 30 - DNA, 22 bp, synthetic construct
  misc_feature 1..22: note = Synthetic
  source 1..22: mol_type = other DNA
atgatcatctcgttgatatcct

SEQ ID NO: 31 - DNA, 22 bp, synthetic construct
  misc_feature 1..22: note = Synthetic
  source 1..22: mol_type = other DNA
aaggtcacccaccatcaccctc

SEQ ID NO: 32 - DNA, 22 bp, synthetic construct
  misc_feature 1..22: note = Synthetic
  source 1..22: mol_type = other DNA
atcaccctctgtgattttataa

SEQ ID NO: 33 - DNA, 22 bp, synthetic construct
  misc_feature 1..22: note = Synthetic
  source 1..22: mol_type = other DNA
ataacttgatcaagcagagaaa

SEQ ID NO: 34 - DNA, 22 bp, synthetic construct
  misc_feature 1..22: note = Synthetic
  source 1..22: mol_type = other DNA
cttgatcaagcagagaaagcca

SEQ ID NO: 35 - DNA, 22 bp, synthetic construct
  misc_feature 1..22: note = Synthetic
  source 1..22: mol_type = other DNA
atcaagcagagaaagccagtcg

SEQ ID NO: 36 - DNA, 22 bp, synthetic construct
  misc_feature 1..22: note = Synthetic
  source 1..22: mol_type = other DNA
cagtcggtaagttctgtccaag

SEQ ID NO: 37 - DNA, 22 bp, synthetic construct
  misc_feature 1..22: note = Synthetic
  source 1..22: mol_type = other DNA
gtaagttctgtccaagcccggt

SEQ ID NO: 38 - DNA, 22 bp, synthetic construct
  misc_feature 1..22: note = Synthetic
  source 1..22: mol_type = other DNA
agcccggttgaaatctgccaga

SEQ ID NO: 39 - DNA, 22 bp, synthetic construct
  misc_feature 1..22: note = Synthetic
  source 1..22: mol_type = other DNA
agcaggtacctccaacatcaag

SEQ ID NO: 40 - DNA, 22 bp, synthetic construct
  misc_feature 1..22: note = Synthetic
  source 1..22: mol_type = other DNA
caacatcaaggaagatggcatt

SEQ ID NO: 41 - DNA, 22 bp, synthetic construct
  misc_feature 1..22: note = Synthetic
  source 1..22: mol_type = other DNA
aggaagatggcatttctagttt

SEQ ID NO: 42 - DNA, 22 bp, synthetic construct
  misc_feature 1..22: note = Synthetic
  source 1..22: mol_type = other DNA
atggcatttctagtttggagat

SEQ ID NO: 43 - DNA, 22 bp, synthetic construct
  misc_feature 1..22: note = Synthetic
  source 1..22: mol_type = other DNA
ctagtttggagatggcagtttc

SEQ ID NO: 44 - DNA, 22 bp, synthetic construct
  misc_feature 1..22: note = Synthetic
  source 1..22: mol_type = other DNA
gatggcagtttccttagtaacc

SEQ ID NO: 45 - DNA, 22 bp, synthetic construct
  misc_feature 1..22: note = Synthetic
  source 1..22: mol_type = other DNA
tagtaaccacaggttgtgtcac

SEQ ID NO: 46 - DNA, 22 bp, synthetic construct
  misc_feature 1..22: note = Synthetic
  source 1..22: mol_type = other DNA
ccacaggttgtgtcaccagagt

SEQ ID NO: 47 - DNA, 22 bp, synthetic construct
  misc_feature 1..22: note = Synthetic
  source 1..22: mol_type = other DNA
gttgtgtcaccagagtaacagt

SEQ ID NO: 48 - DNA, 22 bp, synthetic construct
  misc_feature 1..22: note = Synthetic
  source 1..22: mol_type = other DNA
gagtaacagtctgagtaggagc

SEQ ID NO: 49 - DNA, 22 bp, synthetic construct
  misc_feature 1..22: note = Synthetic
  source 1..22: mol_type = other DNA
tctgagtaggagctaaaatatt

SEQ ID NO: 50 - DNA, 22 bp, synthetic construct
  misc_feature 1..22: note = Synthetic
  source 1..22: mol_type = other DNA
agaaggtatgagaaaaaatgat

SEQ ID NO: 51 - DNA, 22 bp, synthetic construct
  misc_feature 1..22: note = Synthetic
  source 1..22: mol_type = other DNA
tcaagcagaaggtatgagaaaa

SEQ ID NO: 52 - DNA, 22 bp, synthetic construct
  misc_feature 1..22: note = Synthetic
  source 1..22: mol_type = other DNA
tcatcaagcagaaggtatgaga

SEQ ID NO: 53 - DNA, 22 bp, synthetic construct
  misc_feature 1..22: note = Synthetic
  source 1..22: mol_type = other DNA
tcaacgagatgatcatcaagca

SEQ ID NO: 54 - DNA, 22 bp, synthetic construct
  misc_feature 1..22: note = Synthetic
  source 1..22: mol_type = other DNA
gtgaccttgaggatatcaacga

SEQ ID NO: 55 - DNA, 22 bp, synthetic construct
  misc_feature 1..22: note = Synthetic
  source 1..22: mol_type = other DNA
tgggtgaccttgaggatatcaa

SEQ ID NO: 56 - DNA, 22 bp, synthetic construct
  misc_feature 1..22: note = Synthetic
  source 1..22: mol_type = other DNA
gagggtgatggtgggtgacctt

SEQ ID NO: 57 - DNA, 22 bp, synthetic construct
  misc_feature 1..22: note = Synthetic
  source 1..22: mol_type = other DNA
tataaaatcacagagggtgatg

SEQ ID NO: 58 - DNA, 22 bp, synthetic construct
  misc_feature 1..22: note = Synthetic
  source 1..22: mol_type = other DNA
aagttataaaatcacagagggt

SEQ ID NO: 59 - DNA, 22 bp, synthetic construct
  misc_feature 1..22: note = Synthetic
  source 1..22: mol_type = other DNA
atcaagttataaaatcacagag

SEQ ID NO: 60 - DNA, 22 bp, synthetic construct
  misc_feature 1..22: note = Synthetic
  source 1..22: mol_type = other DNA
ttgatcaagttataaaatcaca

SEQ ID NO: 61 - DNA, 22 bp, synthetic construct
  misc_feature 1..22: note = Synthetic
  source 1..22: mol_type = other DNA
ctttctctgcttgatcaagtta

SEQ ID NO: 62 - DNA, 22 bp, synthetic construct
  misc_feature 1..22: note = Synthetic
  source 1..22: mol_type = other DNA
ccgactggctttctctgcttga

SEQ ID NO: 63 - DNA, 22 bp, synthetic construct
  misc_feature 1..22: note = Synthetic
  source 1..22: mol_type = other DNA
acttaccgactggctttctctg

SEQ ID NO: 64 - DNA, 22 bp, synthetic construct
  misc_feature 1..22: note = Synthetic
  source 1..22: mol_type = other DNA
gatgttggaggtacctgctctg

SEQ ID NO: 65 - DNA, 22 bp, synthetic construct
  misc_feature 1..22: note = Synthetic
  source 1..22: mol_type = other DNA
aaatgccatcttccttgatgtt

SEQ ID NO: 66 - DNA, 22 bp, synthetic construct
  misc_feature 1..22: note = Synthetic
  source 1..22: mol_type = other DNA
ccaaactagaaatgccatcttc

SEQ ID NO: 67 - DNA, 22 bp, synthetic construct
  misc_feature 1..22: note = Synthetic
  source 1..22: mol_type = other DNA
aggaaactgccatctccaaact

SEQ ID NO: 68 - DNA, 22 bp, synthetic construct
  misc_feature 1..22: note = Synthetic
  source 1..22: mol_type = other DNA
ctgttactctggtgacacaacc

SEQ ID NO: 69 - DNA, 22 bp, synthetic construct
  misc_feature 1..22: note = Synthetic
  source 1..22: mol_type = other DNA
tagctcctactcagactgttac

SEQ ID NO: 70 - DNA, 22 bp, synthetic construct
  misc_feature 1..22: note = Synthetic
  source 1..22: mol_type = other DNA
aaaaggtatctttgatactaac

SEQ ID NO: 71 - DNA, 22 bp, synthetic construct
  misc_feature 1..22: note = Synthetic
  source 1..22: mol_type = other DNA
ctttgatactaaccttggtttc

SEQ ID NO: 72 - DNA, 22 bp, synthetic construct
  misc_feature 1..22: note = Synthetic
  source 1..22: mol_type = other DNA
ccttggtttctgtgattttctt

SEQ ID NO: 73 - DNA, 22 bp, synthetic construct
  misc_feature 1..22: note = Synthetic
  source 1..22: mol_type = other DNA
tccttagcttccagccattgtg

SEQ ID NO: 74 - DNA, 22 bp, synthetic construct
  misc_feature 1..22: note = Synthetic
  source 1..22: mol_type = other DNA
aacatttcattcaactgttgcc

SEQ ID NO: 75 - DNA, 22 bp, synthetic construct
  misc_feature 1..22: note = Synthetic
  source 1..22: mol_type = other DNA
ttcaactgttgcctccggttct

SEQ ID NO: 76 - DNA, 22 bp, synthetic construct
  misc_feature 1..22: note = Synthetic
  source 1..22: mol_type = other DNA
aggtgttcttgtacttcatccc

SEQ ID NO: 77 - DNA, 22 bp, synthetic construct
  misc_feature 1..22: note = Synthetic
  source 1..22: mol_type = other DNA
cttgtacttcatcccactgatt

SEQ ID NO: 78 - DNA, 22 bp, synthetic construct
  misc_feature 1..22: note = Synthetic
  source 1..22: mol_type = other DNA
actgattctgaattctttcaac

SEQ ID NO: 79 - DNA, 22 bp, synthetic construct
  misc_feature 1..22: note = Synthetic
  source 1..22: mol_type = other DNA
ttctttcaactagaataaaagg

SEQ ID NO: 80 - DNA, 22 bp, synthetic construct
  misc_feature 1..22: note = Synthetic
  source 1..22: mol_type = other DNA
ttcaactagaataaaaggaaaa

SEQ ID NO: 81 - DNA, 22 bp, synthetic construct
  misc_feature 1..22: note = Synthetic
  source 1..22: mol_type = other DNA
agaataaaaggaaaaataaata

SEQ ID NO: 82 - DNA, 22 bp, synthetic construct
  misc_feature 1..22: note = Synthetic
  source 1..22: mol_type = other DNA
gttagtatcaaagatacctttt

SEQ ID NO: 83 - DNA, 22 bp, synthetic construct
  misc_feature 1..22: note = Synthetic
  source 1..22: mol_type = other DNA
cacagaaaccaaggttagtatc

SEQ ID NO: 84 - DNA, 22 bp, synthetic construct
  misc_feature 1..22: note = Synthetic
  source 1..22: mol_type = other DNA
aaagaaaatcacagaaaccaag

SEQ ID NO: 85 - DNA, 22 bp, synthetic construct
  misc_feature 1..22: note = Synthetic
  source 1..22: mol_type = other DNA
tccaaaagaaaatcacagaaac

SEQ ID NO: 86 - DNA, 22 bp, synthetic construct
  misc_feature 1..22: note = Synthetic
  source 1..22: mol_type = other DNA
atacagtagatgcaatccaaaa

SEQ ID NO: 87 - DNA, 22 bp, synthetic construct
  misc_feature 1..22: note = Synthetic
  source 1..22: mol_type = other DNA
aggagggtccctatacagtaga

SEQ ID NO: 88 - DNA, 22 bp, synthetic construct
  misc_feature 1..22: note = Synthetic
  source 1..22: mol_type = other DNA
atggaaggagggtccctataca

SEQ ID NO: 89 - DNA, 22 bp, synthetic construct
  misc_feature 1..22: note = Synthetic
  source 1..22: mol_type = other DNA
agtcatggaaggagggtcccta

SEQ ID NO: 90 - DNA, 22 bp, synthetic construct
  misc_feature 1..22: note = Synthetic
  source 1..22: mol_type = other DNA
agccaagcttgagtcatggaag

SEQ ID NO: 91 - DNA, 22 bp, synthetic construct
  misc_feature 1..22: note = Synthetic
  source 1..22: mol_type = other DNA
ttaggacaggccagagccaagc

SEQ ID NO: 92 - DNA, 22 bp, synthetic construct
  misc_feature 1..22: note = Synthetic
  source 1..22: mol_type = other DNA
tggaagctaaggaagaagctga

SEQ ID NO: 93 - DNA, 22 bp, synthetic construct
  misc_feature 1..22: note = Synthetic
  source 1..22: mol_type = other DNA
aatgaaatgttaaaggattcaa

SEQ ID NO: 94 - DNA, 22 bp, synthetic construct
  misc_feature 1..22: note = Synthetic
  source 1..22: mol_type = other DNA
gcaacagttgaatgaaatgtta

SEQ ID NO: 95 - DNA, 22 bp, synthetic construct
  misc_feature 1..22: note = Synthetic
  source 1..22: mol_type = other DNA
agaaccggaggcaacagttgaa

SEQ ID NO: 96 - DNA, 22 bp, synthetic construct
  misc_feature 1..22: note = Synthetic
  source 1..22: mol_type = other DNA
ccttcagaaccggaggcaacag

SEQ ID NO: 97 - DNA, 22 bp, synthetic construct
  misc_feature 1..22: note = Synthetic
  source 1..22: mol_type = other DNA
gaacaccttcagaaccggaggc

SEQ ID NO: 98 - DNA, 22 bp, synthetic construct
  misc_feature 1..22: note = Synthetic
  source 1..22: mol_type = other DNA
aaagaattcagaatcagtggga

SEQ ID NO: 99 - DNA, 22 bp, synthetic construct
  misc_feature 1..22: note = Synthetic
  source 1..22: mol_type = other DNA
agttgaaagaattcagaatcag

SEQ ID NO: 100 - DNA, 22 bp, synthetic construct
  misc_feature 1..22: note = Synthetic
  source 1..22: mol_type = other DNA
attctagttgaaagaattcaga

SEQ ID NO: 101 - DNA, 22 bp, synthetic construct
  misc_feature 1..22: note = Synthetic
  source 1..22: mol_type = other DNA
ttttattctagttgaaagaatt

SEQ ID NO: 102 - DNA, 22 bp, synthetic construct
  misc_feature 1..22: note = Synthetic
  source 1..22: mol_type = other DNA
tttttccttttattctagttga

SEQ ID NO: 103 - DNA, 22 bp, synthetic construct
  misc_feature 1..22: note = Synthetic
  source 1..22: mol_type = other DNA
atatatttatttttccttttat

SEQ ID NO: 104 - DNA, 22 bp, synthetic construct
  misc_feature 1..22: note = Synthetic
  source 1..22: mol_type = other DNA
taccatttgtatttagcatgtt

SEQ ID NO: 105 - DNA, 22 bp, synthetic construct
  misc_feature 1..22: note = Synthetic
  source 1..22: mol_type = other DNA
atttagcatgttcccaattctc

SEQ ID NO: 106 - DNA, 22 bp, synthetic construct
  misc_feature 1..22: note = Synthetic
  source 1..22: mol_type = other DNA
aactgttcagcttctgttagcc

SEQ ID NO: 107 - DNA, 22 bp, synthetic construct
  misc_feature 1..22: note = Synthetic
  source 1..22: mol_type = other DNA
ttcagcttctgttagccactga

SEQ ID NO: 108 - DNA, 22 bp, synthetic construct
  misc_feature 1..22: note = Synthetic
  source 1..22: mol_type = other DNA
cactgattaaatatctttatat

SEQ ID NO: 109 - DNA, 22 bp, synthetic construct
  misc_feature 1..22: note = Synthetic
  source 1..22: mol_type = other DNA
atgaaaacgccgccatttctca

SEQ ID NO: 110 - DNA, 22 bp, synthetic construct
  misc_feature 1..22: note = Synthetic
  source 1..22: mol_type = other DNA
ccgccatttctcaacagatctg

SEQ ID NO: 111 - DNA, 22 bp, synthetic construct
  misc_feature 1..22: note = Synthetic
  source 1..22: mol_type = other DNA
caacagatctgtcaaatcgcct

SEQ ID NO: 112 - DNA, 22 bp, synthetic construct
  misc_feature 1..22: note = Synthetic
  source 1..22: mol_type = other DNA
taaatacaaatggtatcttaag

SEQ ID NO: 113 - DNA, 22 bp, synthetic construct
  misc_feature 1..22: note = Synthetic
  source 1..22: mol_type = other DNA
atgctaaatacaaatggtatct

SEQ ID NO: 114 - DNA, 22 bp, synthetic construct
  misc_feature 1..22: note = Synthetic
  source 1..22: mol_type = other DNA
aattgggaacatgctaaataca

SEQ ID NO: 115 - DNA, 22 bp, synthetic construct
  misc_feature 1..22: note = Synthetic
  source 1..22: mol_type = other DNA
gagaattgggaacatgctaaat

SEQ ID NO: 116 - DNA, 22 bp, synthetic construct
  misc_feature 1..22: note = Synthetic
  source 1..22: mol_type = other DNA
attcctgagaattgggaacatg

SEQ ID NO: 117 - DNA, 22 bp, synthetic construct
  misc_feature 1..22: note = Synthetic
  source 1..22: mol_type = other DNA
tctcagaaagacacaaattcct

SEQ ID NO: 118 - DNA, 22 bp, synthetic construct
  misc_feature 1..22: note = Synthetic
  source 1..22: mol_type = other DNA
ctgaacagtttctcagaaagac

SEQ ID NO: 119 - DNA, 22 bp, synthetic construct
  misc_feature 1..22: note = Synthetic
  source 1..22: mol_type = other DNA
aatcagtggctaacagaagctg

SEQ ID NO: 120 - DNA, 22 bp, synthetic construct
  misc_feature 1..22: note = Synthetic
  source 1..22: mol_type = other DNA
cattatgatataaagatattta

SEQ ID NO: 121 - DNA, 22 bp, synthetic construct
  misc_feature 1..22: note = Synthetic
  source 1..22: mol_type = other DNA
ttttcattatgatataaagata

SEQ ID NO: 122 - DNA, 22 bp, synthetic construct
  misc_feature 1..22: note = Synthetic
  source 1..22: mol_type = other DNA
ggcggcgttttcattatgatat

SEQ ID NO: 123 - DNA, 22 bp, synthetic construct
  misc_feature 1..22: note = Synthetic
  source 1..22: mol_type = other DNA
tgagaaatggcggcgttttcat

SEQ ID NO: 124 - DNA, 22 bp, synthetic construct
  misc_feature 1..22: note = Synthetic
  source 1..22: mol_type = other DNA
aggcgatttgacagatctgttg

SEQ ID NO: 125 - DNA, 22 bp, synthetic construct
  misc_feature 1..22: note = Synthetic
  source 1..22: mol_type = other DNA
gcttttacctgcaggcgatttg

SEQ ID NO: 126 - DNA, 22 bp, synthetic construct
  misc_feature 1..22: note = Synthetic
  source 1..22: mol_type = other DNA
tgtttgcagacctcctgccacc

SEQ ID NO: 127 - DNA, 22 bp, synthetic construct
  misc_feature 1..22: note = Synthetic
  source 1..22: mol_type = other DNA
ctgccaccgcagattcaggctt

SEQ ID NO: 128 - DNA, 22 bp, synthetic construct
  misc_feature 1..22: note = Synthetic
  source 1..22: mol_type = other DNA
tcaggcttcccaatttttcctg

SEQ ID NO: 129 - DNA, 22 bp, synthetic construct
  misc_feature 1..22: note = Synthetic
  source 1..22: mol_type = other DNA
tagaatactggcatctgttttt

SEQ ID NO: 130 - DNA, 22 bp, synthetic construct
  misc_feature 1..22: note = Synthetic
  source 1..22: mol_type = other DNA
tggcatctgtttttgaggattg

SEQ ID NO: 131 - DNA, 22 bp, synthetic construct
  misc_feature 1..22: note = Synthetic
  source 1..22: mol_type = other DNA
aggattgctgaattatttcttc

SEQ ID NO: 132 - DNA, 22 bp, synthetic construct
  misc_feature 1..22: note = Synthetic
  source 1..22: mol_type = other DNA
aattatttcttccccagttgca

SEQ ID NO: 133 - DNA, 22 bp, synthetic construct
  misc_feature 1..22: note = Synthetic
  source 1..22: mol_type = other DNA
cagttgcattcaatgttctgac

SEQ ID NO: 134 - DNA, 22 bp, synthetic construct
  misc_feature 1..22: note = Synthetic
  source 1..22: mol_type = other DNA
ttctgacaacagtttgccgctg

SEQ ID NO: 135 - DNA, 22 bp, synthetic construct
  misc_feature 1..22: note = Synthetic
  source 1..22: mol_type = other DNA
ttgccgctgcccaatgccatcc

SEQ ID NO: 136 - DNA, 22 bp, synthetic construct
  misc_feature 1..22: note = Synthetic
  source 1..22: mol_type = other DNA
aaacagctgtcagacagaaaaa

SEQ ID NO: 137 - DNA, 22 bp, synthetic construct
  misc_feature 1..22: note = Synthetic
  source 1..22: mol_type = other DNA
gaagcctgaatctgcggtggca

SEQ ID NO: 138 - DNA, 22 bp, synthetic construct
  misc_feature 1..22: note = Synthetic
  source 1..22: mol_type = other DNA
gaaaaattgggaagcctgaatc

SEQ ID NO: 139 - DNA, 22 bp, synthetic construct
  misc_feature 1..22: note = Synthetic
  source 1..22: mol_type = other DNA
tctacaggaaaaattgggaagc

SEQ ID NO: 140 - DNA, 22 bp, synthetic construct
  misc_feature 1..22: note = Synthetic
  source 1..22: mol_type = other DNA
acagatgccagtattctacagg

SEQ ID NO: 141 - DNA, 22 bp, synthetic construct
  misc_feature 1..22: note = Synthetic
  source 1..22: mol_type = other DNA
tcagcaatcctcaaaaacagat

SEQ ID NO: 142 - DNA, 22 bp, synthetic construct
  misc_feature 1..22: note = Synthetic
  source 1..22: mol_type = other DNA
aataattcagcaatcctcaaaa

SEQ ID NO: 143 - DNA, 22 bp, synthetic construct
  misc_feature 1..22: note = Synthetic
  source 1..22: mol_type = other DNA
gcaactggggaagaaataattc

SEQ ID NO: 144 - DNA, 22 bp, synthetic construct
  misc_feature 1..22: note = Synthetic
  source 1..22: mol_type = other DNA
cattgaatgcaactggggaaga

SEQ ID NO: 145 - DNA, 22 bp, synthetic construct
  misc_feature 1..22: note = Synthetic
  source 1..22: mol_type = other DNA
gaacattgaatgcaactgggga

SEQ ID NO: 146 - DNA, 22 bp, synthetic construct
  misc_feature 1..22: note = Synthetic
  source 1..22: mol_type = other DNA
gcggcaaactgttgtcagaaca

SEQ ID NO: 147 - DNA, 22 bp, synthetic construct
  misc_feature 1..22: note = Synthetic
  source 1..22: mol_type = other DNA
ttttggtatcttacaggaactc

SEQ ID NO: 148 - DNA, 22 bp, synthetic construct
  misc_feature 1..22: note = Synthetic
  source 1..22: mol_type = other DNA
gggatccagtatacttacaggc

SEQ ID NO: 149 - DNA, 22 bp, synthetic construct
  misc_feature 1..22: note = Synthetic
  source 1..22: mol_type = other DNA
atccagtatacttacaggctcc

SEQ ID NO: 150 - DNA, 22 bp, synthetic construct
  misc_feature 1..22: note = Synthetic
  source 1..22: mol_type = other DNA
cagtatacttacaggctccaat

SEQ ID NO: 151 - DNA, 22 bp, synthetic construct
  misc_feature 1..22: note = Synthetic
  source 1..22: mol_type = other DNA
atacttacaggctccaatagtg

SEQ ID NO: 152 - DNA, 22 bp, synthetic construct
  misc_feature 1..22: note = Synthetic
  source 1..22: mol_type = other DNA
ccaatagtggtcagtccaggag

SEQ ID NO: 153 - DNA, 22 bp, synthetic construct
  misc_feature 1..22: note = Synthetic
  source 1..22: mol_type = other DNA
aggctgctttgccctcagctct

SEQ ID NO: 154 - DNA, 22 bp, synthetic construct
  misc_feature 1..22: note = Synthetic
  source 1..22: mol_type = other DNA
tttgccctcagctcttgaagta

SEQ ID NO: 155 - DNA, 22 bp, synthetic construct
  misc_feature 1..22: note = Synthetic
  source 1..22: mol_type = other DNA
tttaccgccttccactcagagc

SEQ ID NO: 156 - DNA, 22 bp, synthetic construct
  misc_feature 1..22: note = Synthetic
  source 1..22: mol_type = other DNA
ggactgaccactattggagcct

SEQ ID NO: 157 - DNA, 22 bp, synthetic construct
  misc_feature 1..22: note = Synthetic
  source 1..22: mol_type = other DNA
aagatctgagctctgagtggaa

SEQ ID NO: 158 - DNA, 22 bp, synthetic construct
  misc_feature 1..22: note = Synthetic
  source 1..22: mol_type = other DNA
aggaagttagaagatctgagct

SEQ ID NO: 159 - DNA, 22 bp, synthetic construct
  misc_feature 1..22: note = Synthetic
  source 1..22: mol_type = other DNA
ttttctgttaaagaggaagtta

SEQ ID NO: 160-199 - skipped (40 entries)

SEQ ID NO: 200 - DNA, 22 bp, synthetic construct
  misc_feature 1..22: note = Synthetic
  source 1..22: mol_type = other DNA
tatttagcatgttcccaattct

SEQ ID NO: 201 - DNA, 22 bp, synthetic construct
  misc_feature 1..22: note = Synthetic
  source 1..22: mol_type = other DNA
aacagatctgtcaaatcgcctg

SEQ ID NO: 202 - DNA, 22 bp, synthetic construct
  misc_feature 1..22: note = Synthetic
  source 1..22: mol_type = other DNA
tgctaaatacaaatggtatctt

SEQ ID NO: 203 - DNA, 22 bp, synthetic construct
  misc_feature 1..22: note = Synthetic
  source 1..22: mol_type = other DNA
attgggaacatgctaaatacaa

SEQ ID NO: 204 - DNA, 22 bp, synthetic construct
  misc_feature 1..22: note = Synthetic
  source 1..22: mol_type = other DNA
aaagacacaaattcctgagaat

SEQ ID NO: 205 - DNA, 22 bp, synthetic construct
  misc_feature 1..22: note = Synthetic
  source 1..22: mol_type = other DNA
gaaagacacaaattcctgagaa

SEQ ID NO: 206 - DNA, 22 bp, synthetic construct
  misc_feature 1..22: note = Synthetic
  source 1..22: mol_type = other DNA
atgatataaagatatttaatca

SEQ ID NO: 207 - DNA, 22 bp, synthetic construct
  misc_feature 1..22: note = Synthetic
  source 1..22: mol_type = other DNA
ttgacagatctgttgagaaatg

SEQ ID NO: 208 - DNA, 22 bp, synthetic construct
  misc_feature 1..22: note = Synthetic
  source 1..22: mol_type = other DNA
gatttgacagatctgttgagaa

SEQ ID NO: 209 - DNA, 22 bp, synthetic construct
  misc_feature 1..22: note = Synthetic
  source 1..22: mol_type = other DNA
agacctcctgccaccgcagatt

SEQ ID NO: 210 - DNA, 22 bp, synthetic construct
  misc_feature 1..22: note = Synthetic
  source 1..22: mol_type = other DNA
tcccaatttttcctgtagaata

SEQ ID NO: 211 - DNA, 22 bp, synthetic construct
  misc_feature 1..22: note = Synthetic
  source 1..22: mol_type = other DNA
tagaatactggcatctgttttt

SEQ ID NO: 212 - DNA, 22 bp, synthetic construct
  misc_feature 1..22: note = Synthetic
  source 1..22: mol_type = other DNA
tttgccgctgcccaatgccatc

SEQ ID NO: 213 - DNA, 22 bp, synthetic construct
  misc_feature 1..22: note = Synthetic
  source 1..22: mol_type = other DNA
ctgtcagacagaaaaaagaggt

SEQ ID NO: 214 - DNA, 22 bp, synthetic construct
  misc_feature 1..22: note = Synthetic
  source 1..22: mol_type = other DNA
gctgtcagacagaaaaaagagg

SEQ ID NO: 215 - DNA, 22 bp, synthetic construct
  misc_feature 1..22: note = Synthetic
  source 1..22: mol_type = other DNA
aacagctgtcagacagaaaaaa

SEQ ID NO: 216 - DNA, 22 bp, synthetic construct
  misc_feature 1..22: note = Synthetic
  source 1..22: mol_type = other DNA
aagcctgaatctgcggtggcag

SEQ ID NO: 217 - DNA, 22 bp, synthetic construct
  misc_feature 1..22: note = Synthetic
  source 1..22: mol_type = other DNA
gggaagcctgaatctgcggtgg

SEQ ID NO: 218 - DNA, 22 bp, synthetic construct
  misc_feature 1..22: note = Synthetic
  source 1..22: mol_type = other DNA
aattgggaagcctgaatctgcg

SEQ ID NO: 219 - DNA, 22 bp, synthetic construct
  misc_feature 1..22: note = Synthetic
  source 1..22: mol_type = other DNA
aaaaattgggaagcctgaatct

SEQ ID NO: 220 - DNA, 22 bp, synthetic construct
  misc_feature 1..22: note = Synthetic
  source 1..22: mol_type = other DNA
gccagtattctacaggaaaaat

SEQ ID NO: 221 - DNA, 22 bp, synthetic construct
  misc_feature 1..22: note = Synthetic
  source 1..22: mol_type = other DNA
tgccagtattctacaggaaaaa

SEQ ID NO: 222 - DNA, 22 bp, synthetic construct
  misc_feature 1..22: note = Synthetic
  source 1..22: mol_type = other DNA
aaaaacagatgccagtattcta

SEQ ID NO: 223 - DNA, 22 bp, synthetic construct
  misc_feature 1..22: note = Synthetic
  source 1..22: mol_type = other DNA
tgtcagaacattgaatgcaact

SEQ ID NO: 224 - DNA, 22 bp, synthetic construct
  misc_feature 1..22: note = Synthetic
  source 1..22: mol_type = other DNA
ttgtcagaacattgaatgcaac

SEQ ID NO: 225 - DNA, 22 bp, synthetic construct
  misc_feature 1..22: note = Synthetic
  source 1..22: mol_type = other DNA
gttgtcagaacattgaatgcaa

SEQ ID NO: 226 - DNA, 22 bp, synthetic construct
  misc_feature 1..22: note = Synthetic
  source 1..22: mol_type = other DNA
aactccaggatggcattgggca

SEQ ID NO: 227 - DNA, 22 bp, synthetic construct
  misc_feature 1..22: note = Synthetic
  source 1..22: mol_type = other DNA
tacaggaactccaggatggcat

SEQ ID NO: 228 - DNA, 22 bp, synthetic construct
  misc_feature 1..22: note = Synthetic
  source 1..22: mol_type = other DNA
ttacaggaactccaggatggca

SEQ ID NO: 229 - DNA, 22 bp, synthetic construct
  misc_feature 1..22: note = Synthetic
  source 1..22: mol_type = other DNA
ggtatcttacaggaactccagg

SEQ ID NO: 230 - DNA, 22 bp, synthetic construct
  misc_feature 1..22: note = Synthetic
  source 1..22: mol_type = other DNA
ttttggtatcttacaggaactc

SEQ ID NO: 231 - DNA, 22 bp, synthetic construct
  misc_feature 1..22: note = Synthetic
  source 1..22: mol_type = other DNA
agtatacttacaggctccaata

SEQ ID NO: 232 - DNA, 22 bp, synthetic construct
  misc_feature 1..22: note = Synthetic
  source 1..22: mol_type = other DNA
caggctccaatagtggtcagtc

SEQ ID NO: 233 - DNA, 22 bp, synthetic construct
  misc_feature 1..22: note = Synthetic
  source 1..22: mol_type = other DNA
caatagtggtcagtccaggagc

SEQ ID NO: 234 - DNA, 22 bp, synthetic construct
  misc_feature 1..22: note = Synthetic
  source 1..22: mol_type = other DNA
gtggtcagtccaggagctaggt

SEQ ID NO: 235 - DNA, 22 bp, synthetic construct
  misc_feature 1..22: note = Synthetic
  source 1..22: mol_type = other DNA
ttgccctcagctcttgaagtaa

SEQ ID NO: 236 - DNA, 22 bp, synthetic construct
  misc_feature 1..22: note = Synthetic
  source 1..22: mol_type = other DNA
ctagctcctggactgaccacta

SEQ ID NO: 237 - DNA, 22 bp, synthetic construct
  misc_feature 1..22: note = Synthetic
  source 1..22: mol_type = other DNA
gcaaagcagcctgacctagctc

SEQ ID NO: 238 - DNA, 22 bp, synthetic construct
  misc_feature 1..22: note = Synthetic
  source 1..22: mol_type = other DNA
aaaccgtttacttcaagagctg

SEQ ID NO: 239 - DNA, 22 bp, synthetic construct
  misc_feature 1..22: note = Synthetic
  source 1..22: mol_type = other DNA
taaaccgtttacttcaagagct

SEQ ID NO: 240 - DNA, 22 bp, synthetic construct
  misc_feature 1..22: note = Synthetic
  source 1..22: mol_type = other DNA
agatctgagctctgagtggaag

SEQ ID NO: 241 - DNA, 22 bp, synthetic construct
  misc_feature 1..22: note = Synthetic
  source 1..22: mol_type = other DNA
agaagatctgagctctgagtgg

SEQ ID NO: 242 - DNA, 22 bp, synthetic construct
  misc_feature 1..22: note = Synthetic
  source 1..22: mol_type = other DNA
agttagaagatctgagctctga

SEQ ID NO: 243 - DNA, 22 bp, synthetic construct
  misc_feature 1..22: note = Synthetic
  source 1..22: mol_type = other DNA
tgatcatctcgttgatatcctc

SEQ ID NO: 244 - DNA, 22 bp, synthetic construct
  misc_feature 1..22: note = Synthetic
  source 1..22: mol_type = other DNA
ttgatcaagcagagaaagccag

SEQ ID NO: 245 - DNA, 22 bp, synthetic construct
  misc_feature 1..22: note = Synthetic
  source 1..22: mol_type = other DNA
agtcggtaagttctgtccaagc

SEQ ID NO: 246 - DNA, 22 bp, synthetic construct
  misc_feature 1..22: note = Synthetic
  source 1..22: mol_type = other DNA
gcccggttgaaatctgccagag

SEQ ID NO: 247 - DNA, 22 bp, synthetic construct
  misc_feature 1..22: note = Synthetic
  source 1..22: mol_type = other DNA
cagagcaggtacctccaacatc

SEQ ID NO: 248 - DNA, 22 bp, synthetic construct
  misc_feature 1..22: note = Synthetic
  source 1..22: mol_type = other DNA
ggtacctccaacatcaaggaag

SEQ ID NO: 249 - DNA, 22 bp, synthetic construct
  misc_feature 1..22: note = Synthetic
  source 1..22: mol_type = other DNA
caaggaagatggcatttctagt

SEQ ID NO: 250 - DNA, 22 bp, synthetic construct
  misc_feature 1..22: note = Synthetic
  source 1..22: mol_type = other DNA
agatggcatttctagtttggag

SEQ ID NO: 251 - DNA, 22 bp, synthetic construct
  misc_feature 1..22: note = Synthetic
  source 1..22: mol_type = other DNA
atggcagtttccttagtaacca

SEQ ID NO: 252 - DNA, 22 bp, synthetic construct
  misc_feature 1..22: note = Synthetic
  source 1..22: mol_type = other DNA
gtcaccagagtaacagtctgag

SEQ ID NO: 253 - DNA, 22 bp, synthetic construct
  misc_feature 1..22: note = Synthetic
  source 1..22: mol_type = other DNA
caacgagatgatcatcaagcag

SEQ ID NO: 254 - DNA, 22 bp, synthetic construct
  misc_feature 1..22: note = Synthetic
  source 1..22: mol_type = other DNA
gagggtgatggtgggtgacctt

SEQ ID NO: 255 - DNA, 22 bp, synthetic construct
  misc_feature 1..22: note = Synthetic
  source 1..22: mol_type = other DNA
ataaaatcacagagggtgatgg

SEQ ID NO: 256 - DNA, 22 bp, synthetic construct
  misc_feature 1..22: note = Synthetic
  source 1..22: mol_type = other DNA
tataaaatcacagagggtgatg

SEQ ID NO: 257 - DNA, 22 bp, synthetic construct
  misc_feature 1..22: note = Synthetic
  source 1..22: mol_type = other DNA
agttataaaatcacagagggtg

SEQ ID NO: 258 - DNA, 22 bp, synthetic construct
  misc_feature 1..22: note = Synthetic
  source 1..22: mol_type = other DNA
tgatcaagttataaaatcacag

SEQ ID NO: 259 - DNA, 22 bp, synthetic construct
  misc_feature 1..22: note = Synthetic
  source 1..22: mol_type = other DNA
ttgatcaagttataaaatcaca

SEQ ID NO: 260 - DNA, 22 bp, synthetic construct
  misc_feature 1..22: note = Synthetic
  source 1..22: mol_type = other DNA
gggcttggacagaacttaccga

SEQ ID NO: 261 - DNA, 22 bp, synthetic construct
  misc_feature 1..22: note = Synthetic
  source 1..22: mol_type = other DNA
ctctggcagatttcaaccgggc

SEQ ID NO: 262 - DNA, 22 bp, synthetic construct
  misc_feature 1..22: note = Synthetic
  source 1..22: mol_type = other DNA
acctgctctggcagatttcaac

SEQ ID NO: 263 - DNA, 22 bp, synthetic construct
  misc_feature 1..22: note = Synthetic
  source 1..22: mol_type = other DNA
tacctgctctggcagatttcaa

SEQ ID NO: 264 - DNA, 22 bp, synthetic construct
  misc_feature 1..22: note = Synthetic
  source 1..22: mol_type = other DNA
cttgatgttggaggtacctgct

SEQ ID NO: 265 - DNA, 22 bp, synthetic construct
  misc_feature 1..22: note = Synthetic
  source 1..22: mol_type = other DNA
aatgccatcttccttgatgttg

SEQ ID NO: 266 - DNA, 22 bp, synthetic construct
  misc_feature 1..22: note = Synthetic
  source 1..22: mol_type = other DNA
agaaatgccatcttccttgatg

SEQ ID NO: 267 - DNA, 22 bp, synthetic construct
  misc_feature 1..22: note = Synthetic
  source 1..22: mol_type = other DNA
ggtgacacaacctgtggttact

SEQ ID NO: 268 - DNA, 22 bp, synthetic construct
  misc_feature 1..22: note = Synthetic
  source 1..22: mol_type = other DNA
tgttactctggtgacacaacct

SEQ ID NO: 269 - DNA, 22 bp, synthetic construct
  misc_feature 1..22: note = Synthetic
  source 1..22: mol_type = other DNA
agctcctactcagactgttact

SEQ ID NO: 270 - DNA, 22 bp, synthetic construct
  misc_feature 1..22: note = Synthetic
  source 1..22: mol_type = other DNA
ccttggtttctgtgattttctt

SEQ ID NO: 271 - DNA, 22 bp, synthetic construct
  misc_feature 1..22: note = Synthetic
  source 1..22: mol_type = other DNA
cttttggattgcatctactgta

SEQ ID NO: 272 - DNA, 22 bp, synthetic construct
  misc_feature 1..22: note = Synthetic
  source 1..22: mol_type = other DNA
ttttggattgcatctactgtat

SEQ ID NO: 273 - DNA, 22 bp, synthetic construct
  misc_feature 1..22: note = Synthetic
  source 1..22: mol_type = other DNA
accctccttccatgactcaagc

SEQ ID NO: 274 - DNA, 22 bp, synthetic construct
  misc_feature 1..22: note = Synthetic
  source 1..22: mol_type = other DNA
cttccatgactcaagcttggct

SEQ ID NO: 275 - DNA, 22 bp, synthetic construct
  misc_feature 1..22: note = Synthetic
  source 1..22: mol_type = other DNA
acatttcattcaactgttgcct

SEQ ID NO: 276 - DNA, 22 bp, synthetic construct
  misc_feature 1..22: note = Synthetic
  source 1..22: mol_type = other DNA
tcaactgttgcctccggttctg

SEQ ID NO: 277 - DNA, 22 bp, synthetic construct
  misc_feature 1..22: note = Synthetic
  source 1..22: mol_type = other DNA
ccaaaagaaaatcacagaaacc

SEQ ID NO: 278 - DNA, 22 bp, synthetic construct
  misc_feature 1..22: note = Synthetic
  source 1..22: mol_type = other DNA
gccaagcttgagtcatggaagg

SEQ ID NO: 279 - DNA, 22 bp, synthetic construct
  misc_feature 1..22: note = Synthetic
  source 1..22: mol_type = other DNA
agccaagcttgagtcatggaag

SEQ ID NO: 280 - DNA, 22 bp, synthetic construct
  misc_feature 1..22: note = Synthetic
  source 1..22: mol_type = other DNA
cagagccaagcttgagtcatgg

SEQ ID NO: 281 - DNA, 22 bp, synthetic construct
  misc_feature 1..22: note = Synthetic
  source 1..22: mol_type = other DNA
aggccagagccaagcttgagtc

SEQ ID NO: 282 - DNA, 22 bp, synthetic construct
  misc_feature 1..22: note = Synthetic
  source 1..22: mol_type = other DNA
agaagctgagcaggtcttagga

SEQ ID NO: 283 - DNA, 22 bp, synthetic construct
  misc_feature 1..22: note = Synthetic
  source 1..22: mol_type = other DNA
aaggaagaagctgagcaggtct

SEQ ID NO: 284 - DNA, 22 bp, synthetic construct
  misc_feature 1..22: note = Synthetic
  source 1..22: mol_type = other DNA
ggaagctaaggaagaagctgag

SEQ ID NO: 285 - DNA, 22 bp, synthetic construct
  misc_feature 1..22: note = Synthetic
  source 1..22: mol_type = other DNA
ttcaacacaatggctggaagct

SEQ ID NO: 286 - DNA, 22 bp, synthetic construct
  misc_feature 1..22: note = Synthetic
  source 1..22: mol_type = other DNA
gttaaaggattcaacacaatgg

SEQ ID NO: 287 - DNA, 22 bp, synthetic construct
  misc_feature 1..22: note = Synthetic
  source 1..22: mol_type = other DNA
aaatgttaaaggattcaacaca

SEQ ID NO: 288 - DNA, 22 bp, synthetic construct
  misc_feature 1..22: note = Synthetic
  source 1..22: mol_type = other DNA
gcaacagttgaatgaaatgtta

SEQ ID NO: 289 - DNA, 22 bp, synthetic construct
  misc_feature 1..22: note = Synthetic
  source 1..22: mol_type = other DNA
tacaagaacaccttcagaaccg

SEQ ID NO: 290 - DNA, 22 bp, synthetic construct
  misc_feature 1..22: note = Synthetic
  source 1..22: mol_type = other DNA
aagtacaagaacaccttcagaa

SEQ ID NO: 291 - DNA, 22 bp, synthetic construct
  misc_feature 1..22: note = Synthetic
  source 1..22: mol_type = other DNA
agttgaaagaattcagaatcag

SEQ ID NO: 292 - DNA, 22 bp, synthetic construct
  misc_feature 1..22: note = Synthetic
  source 1..22: mol_type = other DNA
tagttgaaagaattcagaatca

SEQ ID NO: 293-499 - skipped (207 entries)

SEQ ID NO: 500 - DNA, 86 bp, synthetic construct
  misc_feature 1..86: note = Synthetic
  source 1..86: mol_type = other DNA
gtttaagtactctgtgctggaaacagcacagaatctacttaaacaaggcaaaatgccgtgtttatctcgtcaacttgttggcgaga

SEQ ID NO: 501 - DNA, 77 bp, synthetic construct
  misc_feature 1..77: note = Synthetic
  source 1..77: mol_type = other DNA
gttttagtactctggaaacagaatctactaaaacaaggcaaaatgccgtgtttatctcgtcaacttgttggcgagat

SEQ ID NO: 502 - DNA, 87 bp, synthetic construct
  misc_feature 1..87: note = Synthetic
  source 1..87: mol_type = other DNA
gtttaagtactctgtgctggaaacagcacagaatctacttaaacaaggcaaaatgccgtgtttatctcgtcaacttgttggcgagat

SEQ ID NO: 503 - DNA, 77 bp, synthetic construct
  misc_feature 1..77: note = Synthetic
  source 1..77: mol_type = other DNA
gtttaagtactctggaaacagaatctacttaaacaaggcaaaatgccgtgtttatctcgtcaacttgttggcgagat

SEQ ID NO: 504 - DNA, 77 bp, synthetic construct
  misc_feature 1..77: note = Synthetic
  source 1..77: mol_type = other DNA
gtttcagtactctggaaacagaatctactgaaacaaggcaaaatgccgtgtttatctcgtcaacttgttggcgagat

SEQ ID NO: 505-549 - skipped (45 entries)

SEQ ID NO: 550 - protein, 4 aa, synthetic construct
  REGION 1..4: note = Synthetic
GSVD

SEQ ID NO: 551 - protein, 4 aa, synthetic construct
  REGION 1..4: note = Synthetic
GSGS

SEQ ID NO: 552-599 - skipped (48 entries)

SEQ ID NO: 600 - DNA, 76 bp, synthetic construct
  misc_feature 1..76: note = Synthetic
  source 1..76: mol_type = other DNA
gttttagtactctggaaacagaatctactgaaacaagacaatatgtcgtgtttatcccatcaatttattggtggga

SEQ ID NO: 601 - DNA, 86 bp, synthetic construct
  misc_feature 1..86: note = Synthetic
  source 1..86: mol_type = other DNA
gtttaagtactctgtgctggaaacagcacagaatctactgaaacaagacaatatgtcgtgtttatcccatcaatttattggtggga

SEQ ID NO: 602-699 - skipped (98 entries)

SEQ ID NO: 700 - DNA, 450 bp, synthetic construct
  misc_feature 1..450: note = Synthetic
  source 1..450: mol_type = other DNA
ctagactagcatgctgcccatgtaaggaggcaaggcctggggacacccgagatgcctggttataattaacccagacatgtggctgcccccccccccccaacacctgctgcctctaaaaataaccctgcatgccatgttcccggcgaagggccagctgtcccccgccagctagactcagcacttagtttaggaaccagtgagcaagtcagcccttggggcagcccatacaaggccatggggctgggcaagctgcacgcctgggtccggggtgggcacggtgcccgggcaacgagctgaaagctcatctgctctcaggggcccctccctggggacagcccctcctggctagtcacaccctgtaggctcctctatataacccaggggcacaggggctgccctcattctaccaccacctccacagcacagacagacactcaggagccagccagc

SEQ ID NO: 701 - DNA, 436 bp, synthetic construct
  misc_feature 1..436: note = Synthetic
  source 1..436: mol_type = other DNA
tgcccatgtaaggaggcaaggcctggggacacccgagatgcctggttataattaacccagacatgtggctgcccccccccccccaacacctgctgcctctaaaaataaccctgcatgccatgttcccggcgaagggccagctgtcccccgccagctagactcagcacttagtttaggaaccagtgagcaagtcagcccttggggcagcccatacaaggccatggggctgggcaagctgcacgcctgggtccggggtgggcacggtgcccgggcaacgagctgaaagctcatctgctctcaggggcccctccctggggacagcccctcctggctagtcacaccctgtaggctcctctatataacccaggggcacaggggctgccctcattctaccaccacctccacagcacagacagacactcaggagccagccagc

SEQ ID NO: 702 - DNA, 472 bp, synthetic construct
  misc_feature 1..472: note = Synthetic
  source 1..472: mol_type = other DNA
cgagtccaacacccgtgggaatcccatgggcaccatggcccctcgctccaaaaatgctttcgcgtcgcgcagacactgctcggtagtttcggggatcagcgtttgagtaagagcccgcgtctgaaccctccgcgccgccccggccccagtggaaagacgcgcaggcaaaacgcaccacgtgacggagcgtgaccgcgcgccgagcgcgcgccaaggtcgggcaggaagagggcctatttcccatgattccttcatatttgcatatacgatacaaggctgttagagagataattagaattaatttgactgtaaacacaaagatattagtacaaaatacgtgacgtagaaagtaataatttcttgggtagtttgcagttttaaaattatgttttaaaatggactatcatatgcttaccgtaacttgaaagtatttcgatttcttggctttatatatcttgtggaaaggacgaaa

SEQ ID NO: 703 - DNA, 108 bp, synthetic construct
  misc_feature 1..108: note = Synthetic
  source 1..108: mol_type = other DNA
gctcggcgcgcccatatttgcatgtcgctatgtgttctgggaaatcaccataaacgtgaaatgtctttggatttgggaatcttataagttctgtatgagaccacggta

SEQ ID NO: 704 - DNA, 251 bp, synthetic construct
  misc_feature 1..251: note = Synthetic
  source 1..251: mol_type = other DNA
tgacggcgcgccctgcagtatttagcatgccccacccatctgcaaggcattctggatagtgtcaaaacagccggaaatcaagtccgtttatctcaaactttagcattttgggaataaatgatatttgctatgctggttaaattagattttagttaaatttcctgctgaagctctagtacgataagtaacttgacctaagtgtaaagttgagatttccttcaggtttatatagcttgtgcgccgcctgggta

SEQ ID NO: 705 - DNA, 249 bp, synthetic construct
  misc_feature 1..249: note = Synthetic
  source 1..249: mol_type = other DNA
gagggcctatttcccatgattccttcatatttgcatatacgatacaaggctgttagagagataattggaattaatttgactgtaaacacaaagatattagtacaaaatacgtgacgtagaaagtaataatttcttgggtagtttgcagttttaaaattatgttttaaaatggactatcatatgcttaccgtaacttgaaagtatttcgatttcttggctttatatatcttgtggaaaggacgaaacacc

SEQ ID NO: 706 - DNA, 243 bp, synthetic construct
  misc_feature 1..243: note = Synthetic
  source 1..243: mol_type = other DNA
ctgcagtatttagcatgccccacccatctgcaaggcattctggatagtgtcaaaacagccggaaatcaagtccgtttatctcaaactttagcattttgggaataaatgatatttgctatgctggttaaattagattttagttaaatttcctgctgaagctctagtacgataagcaacttgacctaagtgtaaagttgagacttccttcaggtttatatagcttgtgcgccgcttgggtacctc

SEQ ID NO: 707 - DNA, 100 bp, synthetic construct
  misc_feature 1..100: note = Synthetic
  source 1..100: mol_type = other DNA
aatatttgcatgtcgctatgtgttctgggaaatcaccataaacgtgaaatgtctttggatttgggaatcttataagttctgtatgagaccactctttccc

SEQ ID NO: 708 - DNA, 100 bp, synthetic construct
  misc_feature 1..100: note = Synthetic
  source 1..100: mol_type = other DNA
atatttagcatgtcgctatgtgttctgggaaacttgacctaagtgtaaagttgagatttccttcaggtttatatagttctgtatgagaccactctttccc

SEQ ID NO: 709 - DNA, 143 bp, synthetic construct
  misc_feature 1..143: note = Synthetic
  source 1..143: mol_type = other DNA
ggccactccctctctgcgcgctcgctcgctcactgaggccgggcgaccaaaggtcgcccgacgcccgggctttgcccgggcggcctcagtgagcgagcgagcgcgcagagagggagtggccaactccatcactaggggttcct

SEQ ID NO: 710 - DNA, 137 bp, synthetic construct
  misc_feature 1..137: note = Synthetic
  source 1..137: mol_type = other DNA
aggaacccctagtgatggagttggccactccctctctgcgcgctcgctcgctcactgaggccgggcgaccaaaggtcgcccgacgcccgggctttgcccgggcggcctcagtgagcgagcgagcgcgcagagaggga

SEQ ID NO: 711 - protein, 1052 aa, Staphylococcus aureus
  REGION 1..1052: note = misc_feature - Staphylococcus aureus Cas9
KRNYILGLDIGITSVGYGIIDYETRDVIDAGVRLFKEANVENNEGRRSKRGARRLKRRRRHRIQRVKKLLFDYNLLTDHSELSGINPYEARVKGLSQKLSEEEFSAALLHLAKRRGVHNVNEVEEDTGNELSTKEQISRNSKALEEKYVAELQLERLKKDGEVRGSINRFKTSDYVKEAKQLLKVQKAYHQLDQSFIDTYIDLLETRRTYYEGPGEGSPFGWKDIKEWYEMLMGHCTYFPEELRSVKYAYNADLYNALNDLNNLVITRDENEKLEYYEKFQIIENVFKQKKKPTLKQIAKEILVNEEDIKGYRVTSTGKPEFTNLKVYHDIKDITARKEIIENAELLDQIAKILTIYQSSEDIQEELTNLNSELTQEEIEQISNLKGYTGTHNLSLKAINLILDELWHTNDNQIAIFNRLKLVPKKVDLSQQKEIPTTLVDDFILSPVVKRSFIQSIKVINAIIKKYGLPNDIIIELAREKNSKDAQKMINEMQKRNRQTNERIEEIIRTTGKENAKYLIEKIKLHDMQEGKCLYSLEAIPLEDLLNNPFNYEVDHIIPRSVSFDNSFNNKVLVKQEENSKKGNRTPFQYLSSSDSKISYETFKKHILNLAKGKGRISKTKKEYLLEERDINRFSVQKDFINRNLVDTRYATRGLMNLLRSYFRVNNLDVKVKSINGGFTSFLRRKWKFKKERNKGYKHHAEDALIIANADFIFKEWKKLDKAKKVMENQMFEEKQAESMPEIETEQEYKEIFITPHQIKHIKDFKDYKYSHRVDKKPNRELINDTLYSTRKDDKGNTLIVNNLNGLYDKDNDKLKKLINKSPEKLLMYHHDPQTYQKLKLIMEQYGDEKNPLYKYYEETGNYLTKYSKKDNGPVIKKIKYYGNKLNAHLDITDDYPNSRNKVVKLSLKPYRFDVYLDNGVYKFVTVKNLDVIKKENYYEVNSKCYEEAKKLKKISNQAEFIASFYNNDLIKINGELYRVIGVNNDLLNRIEVNMIDITYREYLENMNDKRPPRIIKTIASKTQSIKKYSTDILGNLYEVKSKKHPQIIKKG

SEQ ID NO: 712 - protein, 1053 aa, Staphylococcus lugdunensis
  REGION 1..1053: note = misc_feature - Staphylococcus lugdunensis Cas9
NQKFILGLDIGITSVGYGLIDYETKNIIDAGVRLFPEANVENNEGRRSKRGSRRLKRRRIHRLERVKKLLEDYNLLDQSQIPQSTNPYAIRVKGLSEALSKDELVIALLHIAKRRGIHKIDVIDSNDDVGNELSTKEQLNKNSKLLKDKFVCQIQLERMNEGQVRGEKNRFKTADIIKEIIQLLNVQKNFHQLDENFINKYIELVEMRREYFEGPGKGSPYGWEGDPKAWYETLMGHCTYFPDELRSVKYAYSADLFNALNDLNNLVIQRDGLSKLEYHEKYHIIENVFKQKKKPTLKQIANEINVNPEDIKGYRITKSGKPQFTEFKLYHDLKSVLFDQSILENEDVLDQIAEILTIYQDKDSIKSKLTELDILLNEEDKENIAQLTGYTGTHRLSLKCIRLVLEEQWYSSRNQMEIFTHLNIKPKKINLTAANKIPKAMIDEFILSPVVKRTFGQAINLINKIIEKYGVPEDIIIELARENNSKDKQKFINEMQKKNENTRKRINEIIGKYGNQNAKRLVEKIRLHDEQEGKCLYSLESIPLEDLLNNPNHYEVDHIIPRSVSFDNSYHNKVLVKQSENSKKSNLTPYQYFNSGKSKLSYNQFKQHILNLSKSQDRISKKKKEYLLEERDINKFEVQKEFINRNLVDTRYATRELTNYLKAYFSANNMNVKVKTINGSFTDYLRKVWKFKKERNHGYKHHAEDALIIANADFLFKENKKLKAVNSVLEKPEIETKQLDIQVDSEDNYSEMFIIPKQVQDIKDFRNFKYSHRVDKKPNRQLINDTLYSTRKKDNSTYIVQTIKDIYAKDNTTLKKQFDKSPEKFLMYQHDPRTFEKLEVIMKQYANEKNPLAKYHEETGEYLTKYSKKNNGPIVKSLKYIGNKLGSHLDVTHQFKSSTKKLVKLSIKPYRFDVYLTDKGYKFITISYLDVLKKDNYYYIPEQKYDKLKLGKAIDKNAKFIASFYKNDLIKLDGEIYKIIGVNSDTRNMIELDLPDIRYKEYCELNNIKGEPRIKKTIGKKVNSIEKLTTDVLGNVFTNTQYTKPQLLFKRGN

SEQ ID NO: 713 - protein, 7 aa, unidentified
  REGION 1..7: note = SV40 NLS
PKKKRKV

SEQ ID NO: 714 - protein, 16 aa, synthetic construct
  REGION 1..16: note = Synthetic
KRPAATKKAGQAKKKK

SEQ ID NO: 715 - protein, 1052 aa, synthetic construct
  REGION 1..1052: note = Synthetic
KRNYILGLDIGITSVGYGIIDYETRDVIDAGVRLFKEANVENNEGRRSKRGARRLKRRRRHRIQRVKKLLFDYNLLTDHSELSGINPYEARVKGLSQKLSEEEFSAALLHLAKRRGVHNVNEVEEDTGNELSTKEQISRNSKALEEKYVAELQLERLKKDGEVRGSINRFKTSDYVKEAKQLLKVQKAYHQLDQSFIDTYIDLLETRRTYYEGPGEGSPFGWKDIKEWYEMLMGHCTYFPEELRSVKYAYNADLYNALNDLNNLVITRDENEKLEYYEKFQIIENVFKQKKKPTLKQIAKEILVNEEDIKGYRVTSTGKPEFTNLKVYHDIKDITARKEIIENAELLDQIAKILTIYQSSEDIQEELTNLNSELTQEEIEQISNLKGYTGTHNLSLKAINLILDELWHTNDNQIAIFNRLKLVPKKVDLSQQKEIPTTLVDDFILSPVVKRSFIQSIKVINAIIKKYGLPNDIIIELAREKNSKDAQKMINEMQKRNRQTNERIEEIIRTTGKENAKYLIEKIKLHDMQEGKCLYSLEAIPLEDLLNNPFNYEVDHIIPRSVSFDNSFNNKVLVKQEENSKKGNRTPFQYLSSSDSKISYETFKKHILNLAKGKGRISKTKKEYLLEERDINRFSVQKDFINRNLVDTRYATRGLMNLLRSYFRVNNLDVKVKSINGGFTSFLRRKWKFKKERNKGYKHHAEDALIIANADFIFKEWKKLDKAKKVMENQMFEEKQAESMPEIETEQEYKEIFITPHQIKHIKDFKDYKYSHRVDKKPNRKLINDTLYSTRKDDKGNTLIVNNLNGLYDKDNDKLKKLINKSPEKLLMYHHDPQTYQKLKLIMEQYGDEKNPLYKYYEETGNYLTKYSKKDNGPVIKKIKYYGNKLNAHLDITDDYPNSRNKVVKLSLKPYRFDVYLDNGVYKFVTVKNLDVIKKENYYEVNSKCYEEAKKLKKISNQAEFIASFYKNDLIKINGELYRVIGVNNDLLNRIEVNMIDITYREYLENMNDKRPPHIIKTIASKTQSIKKYSTDILGNLYEVKSKKHPQIIKKG

SEQ ID NO: 716 - protein, 1052 aa, synthetic construct
  REGION 1..1052: note = Synthetic
KRNYILGLDIGITSVGYGIIDYETRDVIDAGVRLFKEANVENNEGRRSKRGARRLKRRRRHRIQRVKKLLFDYNLLTDHSELSGINPYEARVKGLSQKLSEEEFSAALLHLAKRRGVHNVNEVEEDTGNELSTKEQISRNSKALEEKYVAELQLERLKKDGEVRGSINRFKTSDYVKEAKQLLKVQKAYHQLDQSFIDTYIDLLETRRTYYEGPGEGSPFGWKDIKEWYEMLMGHCTYFPEELASVKYAYNADLYNALNDLNNLVITRDENEKLEYYEKFQIIENVFKQKKKPTLKQIAKEILVNEEDIKGYRVTSTGKPEFTNLKVYHDIKDITARKEIIENAELLDQIAKILTIYQSSEDIQEELTNLNSELTQEEIEQISNLKGYTGTHNLSLKAINLILDELWHTNDAQIAIFARLKLVPKKVDLSQQKEIPTTLVDDFILSPVVKRSFIQSIKVINAIIKKYGLPNDIIIELAREKNSKDAQKMINEMQKRNRQTNERIEEIIRTTGKENAKYLIEKIKLHDMQEGKCLYSLEAIPLEDLLNNPFNYEVDHIIPRSVSFDNSFNNKVLVKQEENSKKGNRTPFQYLSSSDSKISYETFKKHILNLAKGKGRISKTKKEYLLEERDINRFSVQKDFINRNLVDTRYATAGLMNLLRSYFRVNNLDVKVKSINGGFTSFLRRKWKFKKERNKGYKHHAEDALIIANADFIFKEWKKLDKAKKVMENQMFEEKQAESMPEIETEQEYKEIFITPHQIKHIKDFKDYKYSHRVDKKPNRELINDTLYSTRKDDKGNTLIVNNLNGLYDKDNDKLKKLINKSPEKLLMYHHDPQTYQKLKLIMEQYGDEKNPLYKYYEETGNYLTKYSKKDNGPVIKKIKYYGNKLNAHLDITDDYPNSRNKVVKLSLKPYRFDVYLDNGVYKFVTVKNLDVIKKENYYEVNSKCYEEAKKLKKISNQAEFIASFYNNDLIKINGELYRVIGVNNDLLNRIEVNMIDITYREYLENMNDKRPPRIIKTIASKTQSIKKYSTDILGNLYEVKSKKHPQIIKKG

SEQ ID NO: 717 - protein, 1052 aa, synthetic construct
  REGION 1..1052: note = Synthetic
KRNYILGLDIGITSVGYGIIDYETRDVIDAGVRLFKEANVENNEGRRSKRGARRLKRRRRHRIQRVKKLLFDYNLLTDHSELSGINPYEARVKGLSQKLSEEEFSAALLHLAKRRGVHNVNEVEEDTGNELSTKEQISRNSKALEEKYVAELQLERLKKDGEVRGSINRFKTSDYVKEAKQLLKVQKAYHQLDQSFIDTYIDLLETRRTYYEGPGEGSPFGWKDIKEWYEMLMGHCTYFPEELASVKYAYNADLYNALNDLNNLVITRDENEKLEYYEKFQIIENVFKQKKKPTLKQIAKEILVNEEDIKGYRVTSTGKPEFTNLKVYHDIKDITARKEIIENAELLDQIAKILTIYQSSEDIQEELTNLNSELTQEEIEQISNLKGYTGTHNLSLKAINLILDELWHTNDAQIAIFARLKLVPKKVDLSQQKEIPTTLVDDFILSPVVKRSFIQSIKVINAIIKKYGLPNDIIIELAREKNSKDAQKMINEMQKRNRQTNERIEEIIRTTGKENAKYLIEKIKLHDMQEGKCLYSLEAIPLEDLLNNPFNYEVDHIIPRSVSFDNSFNNKVLVKQEENSKKGNRTPFQYLSSSDSKISYETFKKHILNLAKGKGRISKTKKEYLLEERDINRFSVQKDFINRNLVDTRYATAGLMNLLRSYFRVNNLDVKVKSINGGFTSFLRRKWKFKKERNKGYKHHAEDALIIANADFIFKEWKKLDKAKKVMENQMFEEKQAESMPEIETEQEYKEIFITPHQIKHIKDFKDYKYSHRVDKKPNRKLINDTLYSTRKDDKGNTLIVNNLNGLYDKDNDKLKKLINKSPEKLLMYHHDPQTYQKLKLIMEQYGDEKNPLYKYYEETGNYLTKYSKKDNGPVIKKIKYYGNKLNAHLDITDDYPNSRNKVVKLSLKPYRFDVYLDNGVYKFVTVKNLDVIKKENYYEVNSKCYEEAKKLKKISNQAEFIASFYKNDLIKINGELYRVIGVNNDLLNRIEVNMIDITYREYLENMNDKRPPHIIKTIASKTQSIKKYSTDILGNLYEVKSKKHPQIIKKG

SEQ ID NO: 718 - protein, 1053 aa, synthetic construct
  REGION 1..1053: note = Synthetic
NQKFILGLDIGITSVGYGLIDYETKNIIDAGVRLFPEANVENNEGRRSKRGSRRLKRRRIHRLERVKKLLEDYNLLDQSQIPQSTNPYAIRVKGLSEALSKDELVIALLHIAKRRGIHKIDVIDSNDDVGNELSTKEQLNKNSKLLKDKFVCQIQLERMNEGQVRGEKNRFKTADIIKEIIQLLNVQKNFHQLDENFINKYIELVEMRREYFEGPGKGSPYGWEGDPKAWYETLMGHCTYFPDELRSVKYAYSADLFNALNDLNNLVIQRDGLSKLEYHEKYHIIENVFKQKKKPTLKQIANEINVNPEDIKGYRITKSGKPQFTEFKLYHDLKSVLFDQSILENEDVLDQIAEILTIYQDKDSIKSKLTELDILLNEEDKENIAQLTGYTGTHRLSLKCIRLVLEEQWYSSRNQMEIFTHLNIKPKKINLTAANKIPKAMIDEFILSPVVKRTFGQAINLINKIIEKYGVPEDIIIELARENNSKDKQKFINEMQKKNENTRKRINEIIGKYGNQNAKRLVEKIRLHDEQEGKCLYSLESIPLEDLLNNPNHYEVDHIIPRSVSFDNSYHNKVLVKQSENSKKSNLTPYQYFNSGKSKLSYNQFKQHILNLSKSQDRISKKKKEYLLEERDINKFEVQKEFINRNLVDTRYATRELTNYLKAYFSANNMNVKVKTINGSFTDYLRKVWKFKKERNHGYKHHAEDALIIANADFLFKENKKLKAVNSVLEKPEIETKQLDIQVDSEDNYSEMFIIPKQVQDIKDFRNFKYSHRVDKKPNRKLINDTLYSTRKKDNSTYIVQTIKDIYAKDNTTLKKQFDKSPEKFLMYQHDPRTFEKLEVIMKQYANEKNPLAKYHEETGEYLTKYSKKNNGPIVKSLKYIGNKLGSHLDVTHQFKSSTKKLVKLSIKPYRFDVYLTDKGYKFITISYLDVLKKDNYYYIPEQKYDKLKLGKAIDKNAKFIASFYKNDLIKLDGEIYKIIGVNSDTRNMIELDLPDIRYKEYCELNNIKGEPHIKKTIGKKVNSIEKLTTDVLGNVFTNTQYTKPQLLFKRGN

SEQ ID NO: 719 - protein, 1053 aa, synthetic construct
  REGION 1..1053: note = Synthetic
NQKFILGLDIGITSVGYGLIDYETKNIIDAGVRLFPEANVENNEGRRSKRGSRRLKRRRIHRLERVKKLLEDYNLLDQSQIPQSTNPYAIRVKGLSEALSKDELVIALLHIAKRRGIHKIDVIDSNDDVGNELSTKEQLNKNSKLLKDKFVCQIQLERMNEGQVRGEKNRFKTADIIKEIIQLLNVQKNFHQLDENFINKYIELVEMRREYFEGPGKGSPYGWEGDPKAWYETLMGHCTYFPDELASVKYAYSADLFNALNDLNNLVIQRDGLSKLEYHEKYHIIENVFKQKKKPTLKQIANEINVNPEDIKGYRITKSGKPQFTEFKLYHDLKSVLFDQSILENEDVLDQIAEILTIYQDKDSIKSKLTELDILLNEEDKENIAQLTGYTGTHRLSLKCIRLVLEEQWYSSRAQMEIFAHLNIKPKKINLTAANKIPKAMIDEFILSPVVKRTFGQAINLINKIIEKYGVPEDIIIELARENNSKDKQKFINEMQKKNENTRKRINEIIGKYGNQNAKRLVEKIRLHDEQEGKCLYSLESIPLEDLLNNPNHYEVDHIIPRSVSFDNSYHNKVLVKQSENSKKSNLTPYQYFNSGKSKLSYNQFKQHILNLSKSQDRISKKKKEYLLEERDINKFEVQKEFINRNLVDTRYATAELTNYLKAYFSANNMNVKVKTINGSFTDYLRKVWKFKKERNHGYKHHAEDALIIANADFLFKENKKLKAVNSVLEKPEIETKQLDIQVDSEDNYSEMFIIPKQVQDIKDFRNFKYSHRVDKKPNRQLINDTLYSTRKKDNSTYIVQTIKDIYAKDNTTLKKQFDKSPEKFLMYQHDPRTFEKLEVIMKQYANEKNPLAKYHEETGEYLTKYSKKNNGPIVKSLKYIGNKLGSHLDVTHQFKSSTKKLVKLSIKPYRFDVYLTDKGYKFITISYLDVLKKDNYYYIPEQKYDKLKLGKAIDKNAKFIASFYKNDLIKLDGEIYKIIGVNSDTRNMIELDLPDIRYKEYCELNNIKGEPRIKKTIGKKVNSIEKLTTDVLGNVFTNTQYTKPQLLFKRGN

SEQ ID NO: 720 - protein, 1053 aa, synthetic construct
  REGION 1..1053: note = Synthetic
NQKFILGLDIGITSVGYGLIDYETKNIIDAGVRLFPEANVENNEGRRSKRGSRRLKRRRIHRLERVKKLLEDYNLLDQSQIPQSTNPYAIRVKGLSEALSKDELVIALLHIAKRRGIHKIDVIDSNDDVGNELSTKEQLNKNSKLLKDKFVCQIQLERMNEGQVRGEKNRFKTADIIKEIIQLLNVQKNFHQLDENFINKYIELVEMRREYFEGPGKGSPYGWEGDPKAWYETLMGHCTYFPDELASVKYAYSADLFNALNDLNNLVIQRDGLSKLEYHEKYHIIENVFKQKKKPTLKQIANEINVNPEDIKGYRITKSGKPQFTEFKLYHDLKSVLFDQSILENEDVLDQIAEILTIYQDKDSIKSKLTELDILLNEEDKENIAQLTGYTGTHRLSLKCIRLVLEEQWYSSRAQMEIFAHLNIKPKKINLTAANKIPKAMIDEFILSPVVKRTFGQAINLINKIIEKYGVPEDIIIELARENNSKDKQKFINEMQKKNENTRKRINEIIGKYGNQNAKRLVEKIRLHDEQEGKCLYSLESIPLEDLLNNPNHYEVDHIIPRSVSFDNSYHNKVLVKQSENSKKSNLTPYQYFNSGKSKLSYNQFKQHILNLSKSQDRISKKKKEYLLEERDINKFEVQKEFINRNLVDTRYATAELTNYLKAYFSANNMNVKVKTINGSFTDYLRKVWKFKKERNHGYKHHAEDALIIANADFLFKENKKLKAVNSVLEKPEIETKQLDIQVDSEDNYSEMFIIPKQVQDIKDFRNFKYSHRVDKKPNRKLINDTLYSTRKKDNSTYIVQTIKDIYAKDNTTLKKQFDKSPEKFLMYQHDPRTFEKLEVIMKQYANEKNPLAKYHEETGEYLTKYSKKNNGPIVKSLKYIGNKLGSHLDVTHQFKSSTKKLVKLSIKPYRFDVYLTDKGYKFITISYLDVLKKDNYYYIPEQKYDKLKLGKAIDKNAKFIASFYKNDLIKLDGEIYKIIGVNSDTRNMIELDLPDIRYKEYCELNNIKGEPHIKKTIGKKVNSIEKLTTDVLGNVFTNTQYTKPQLLFKRGN

SEQ ID NO: 721 - skipped

SEQ ID NO: 722 - DNA, 27 bp, synthetic construct
  misc_feature 1..27: note = Synthetic
  source 1..27: mol_type = other DNA
ccggcagctaagaaaaagaaactggat

SEQ ID NO: 723 - DNA, 54 bp, unidentified
  misc_feature 1..54: note = Synthetic
  misc_feature 1..54: note = SV40 NLS
  source 1..54: mol_type = unassigned DNA
atgatggccccaaagaagaagcggaaggtcggtatccacggagtcccagcagcc

SEQ ID NO: 724 - DNA, 57 bp, synthetic construct
  misc_feature 1..57: note = Synthetic
  source 1..57: mol_type = other DNA
tcgtcggcagcgtcagatgtgtataagagacaggtctttctgtcttgtatcctttgg

SEQ ID NO: 725 - DNA, 54 bp, synthetic construct
  misc_feature 1..54: note = Synthetic
  source 1..54: mol_type = other DNA
gtctcgtgggctcggagatgtgtataagagacagaatgttagtgcctttcaccc

SEQ ID NO: 726 - DNA, 24 bp, synthetic construct
  misc_feature 1..24: note = Synthetic
  source 1..24: mol_type = other DNA
gtctttctgtcttgtatcctttgg

SEQ ID NO: 727-803 - skipped (77 entries)

SEQ ID NO: 804 - DNA, 23 bp, synthetic construct
  misc_feature 1..23: note = Synthetic
  source 1..23: mol_type = other DNA
aaatgtgagataacgtttggaag

SEQ ID NO: 805 - DNA, 24 bp, synthetic construct
  misc_feature 1..24: note = Synthetic
  source 1..24: mol_type = other DNA
tttcagctttaacgtgattttctg

SEQ ID NO: 806-809 - skipped (4 entries)

SEQ ID NO: 810 - DNA, 56 bp, synthetic construct
  misc_feature 1..56: note = Synthetic
  source 1..56: mol_type = other DNA
tcgtcggcagcgtcagatgtgtataagagacagaaatgtgagataacgtttggaag

SEQ ID NO: 811 - DNA, 58 bp, synthetic construct
  misc_feature 1..58: note = Synthetic
  source 1..58: mol_type = other DNA
gtctcgtgggctcggagatgtgtataagagacagtttcagctttaacgtgattttctg

SEQ ID NO: 812-899 - skipped (88 entries)

SEQ ID NO: 900 - DNA, 77 bp, synthetic construct
  misc_feature 1..77: note = Synthetic
  source 1..77: mol_type = other DNA
gttttagtactctggaaacagaatctactgaaacaagacaatatgtcgtgtttatcccatcaatttattggtgggat

SEQ ID NO: 901 - DNA, 77 bp, synthetic construct
  misc_feature 1..77: note = Synthetic
  source 1..77: mol_type = other DNA
gtttcagtactctggaaacagaatctactgaaacaagacaatatgtcgtgtttatcccatcaatttattggtgggat

SEQ ID NO: 902 - DNA, 77 bp, synthetic construct
  misc_feature 1..77: note = Synthetic
  source 1..77: mol_type = other DNA
gtttggtaacctaggaaactagatcttaccaaacaagacaatatgtcgtgtttatcccatcaatttattggtgggat

SEQ ID NO: 903 - DNA, 77 bp, synthetic construct
  misc_feature 1..77: note = Synthetic
  source 1..77: mol_type = other DNA
gtttcagtactctggaaacagaatctactgaaacaaggcaaaatgccgtgtttatcccatcaatttattggtgggat

SEQ ID NO: 904 - DNA, 77 bp, synthetic construct
  misc_feature 1..77: note = Synthetic
  source 1..77: mol_type = other DNA
gtttcagtactctggaaacagaatctactgaaacaagacaatatgtcgcgcccatcccatcaatttattggtgggat

SEQ ID NO: 905 - DNA, 77 bp, synthetic construct
  misc_feature 1..77: note = Synthetic
  source 1..77: mol_type = other DNA
gtttcagtactctggaaacagaatctactgaaacaagacaatatgtcgtgtttatgggttgaatttattcgacccat

SEQ ID NO: 906 - DNA, 77 bp, synthetic construct
  misc_feature 1..77: note = Synthetic
  source 1..77: mol_type = other DNA
gtttggtaacctaggaaactagatcttaccaaacaaggcaaaatgccgtgtttatcccatcaatttattggtgggat

SEQ ID NO: 907 - DNA, 77 bp, synthetic construct
  misc_feature 1..77: note = Synthetic
  source 1..77: mol_type = other DNA
gtttggtaacctaggaaactagatcttaccaaacaagacaatatgtcgcgcccatcccatcaatttattggtgggat

SEQ ID NO: 908 - DNA, 77 bp, synthetic construct
  misc_feature 1..77: note = Synthetic
  source 1..77: mol_type = other DNA
gtttggtaacctaggaaactagatcttaccaaacaagacaatatgtcgtgtttatgggttgaatttattcgacccat

SEQ ID NO: 909 - DNA, 77 bp, synthetic construct
  misc_feature 1..77: note = Synthetic
  source 1..77: mol_type = other DNA
gtttcagtactctggaaacagaatctactgaaacaaggcaaaatgccgcgcccatcccatcaatttattggtgggat

SEQ ID NO: 910 - DNA, 77 bp, synthetic construct
  misc_feature 1..77: note = Synthetic
  source 1..77: mol_type = other DNA
gtttcagtactctggaaacagaatctactgaaacaaggcaaaatgccgtgtttatgggttgaatttattcgacccat

SEQ ID NO: 911 - DNA, 77 bp, synthetic construct
  misc_feature 1..77: note = Synthetic
  source 1..77: mol_type = other DNA
gtttcagtactctggaaacagaatctactgaaacaagacaatatgtcgcgcccatgggttgaatttattcgacccat

SEQ ID NO: 912 - DNA, 77 bp, synthetic construct
  misc_feature 1..77: note = Synthetic
  source 1..77: mol_type = other DNA
gtttggtaacctaggaaactagatcttaccaaacaaggcaaaatgccgcgcccatcccatcaatttattggtgggat

SEQ ID NO: 913 - DNA, 77 bp, synthetic construct
  misc_feature 1..77: note = Synthetic
  source 1..77: mol_type = other DNA
gtttggtaacctaggaaactagatcttaccaaacaaggcaaaatgccgtgtttatgggttgaatttattcgacccat

SEQ ID NO: 914 - DNA, 77 bp, synthetic construct
  misc_feature 1..77: note = Synthetic
  source 1..77: mol_type = other DNA
gtttggtaacctaggaaactagatcttaccaaacaagacaatatgtcgcgcccatgggttgaatttattcgacccat

SEQ ID NO: 915 - DNA, 77 bp, synthetic construct
  misc_feature 1..77: note = Synthetic
  source 1..77: mol_type = other DNA
gtttcagtactctggaaacagaatctactgaaacaaggcaaaatgccgcgcccatgggttgaatttattcgacccat

SEQ ID NO: 916 - DNA, 77 bp, synthetic construct
  misc_feature 1..77: note = Synthetic
  source 1..77: mol_type = other DNA
gtttggtaacctaggaaactagatcttaccaaacaaggcaaaatgccgcgcccatgggttgaatttattcgacccat

SEQ ID NO: 917 - DNA, 87 bp, synthetic construct
  misc_feature 1..87: note = Synthetic
  source 1..87: mol_type = other DNA
gtttcagtactctgtgctggaaacagcacagaatctactgaaacaagacaatatgtcgtgtttatcccatcaatttattggtgggat

SEQ ID NO: 918 - DNA, 3171 bp, synthetic construct
  misc_feature 1..3171: note = Synthetic
  source 1..3171: mol_type = other DNA
atgaatcagaaattcatcctgggactggacatcggcattacctctgtgggctacggcttgattgactacgagaccaagaacatcatcgacgccggcgttagactgtttcctgaggccaatgtggaaaacaacgagggcagacggtctaagcggggctctagacgactgaaaagaagaagaatccacagactggaaagagtgaagctgctgctgaccgagtacgacctgatcaataaggaacagatccctacaagcaacaacccctaccagattagagtgaagggcctgagcgagatcctgagcaaagacgagctggccatcgccctgctgcacctggccaagcggaggggcatccacaacgtggatgtggccgccgacaaggaggaaaccgccagcgactccctgagcaccaaagatcagatcaacaagaatgccaagttcctggagagcagatacgtgtgcgagctgcagaaggagagattggagaacgagggccacgtgcggggcgtggagaatagattcctgacaaaagatatcgtgcgggaagccaagaagatcatcgacacccagatgcagtactatcctgaaatcgacgaaaccttcaaggagaagtacatcagcctggtcgaaaccagacgcgagtatttcgagggccccggacagggctctcctttcggctggaacggcgatctgaagaagtggtacgagatgctgatgggacactgcacctacttccctcaagagctgagatctgtgaagtacgcctacagcgccgatctgttcaacgccctgaacgatctgaacaaccttatcatccagcgggacaattctgagaagctggaataccacgagaaatatcatatcatcgagaacgtctttaaacaaaagaaaaagcctaccctgaagcagatcgccaaggagatcggagtgaatcctgaggatatcaaaggctacagaatcacaaagtccggcacccctgagttcaccagctttaagctgttccacgacctgaagaaggtcgtgaaagaccacgccatcctcgatgacatcgatctgctgaaccagatcgctgagatcctgacaatctaccaggacaaagattctatcgtggctgaactgggacagctggaataccttatgagcgaggccgacaagcaaagcatctccgaactgaccggctacacgggcacccatagcctgagcctgaagtgtatgaacatgatcatcgatgagctgtggcactctagcatgaaccagatggaagttttcacctacctgaacatgcggcctaagaagtacgagctgaagggctaccagagaatccccaccgatatgatcgacgacgccatcctgagccccgtggtgaaaagaacattcatccagagcatcaacgtgatcaacaaggtgatcgagaagtacggcattccagaggacatcatcatcgagctggccagagaaaacaacagcgacgatagaaagaagtttatcaacaacctgcagaaaaaaaacgaggccacccggaagagaattaatgagatcatcggccagacaggcaaccagaacgccaaaaggatcgtggaaaaaatcagactgcacgaccagcaggagggcaagtgcctgtactctctggaaagcatccccctggaggacctgctgaacaatccaaatcactacgaggtggaccacatcatccctagaagcgtcagcttcgacaacagctaccacaacaaggtgctggtgaagcagagcgaaaacagtaagaaatccaacctgacaccttaccagtactttaacagcggcaagagcaagctgagctacaaccagttcaagcagcacatcctgaacctgtccaaatctcaggatagaatctccaagaaaaagaaggaatacctgctggaggagagagatatcaacaagttcgaagtccaaaaggagttcatcaacaggaacctggtggacacccggtacgccacaagagagctgacaaactacctgaaagcctacttcagcgctaacaacatgaacgtgaaggtgaaaaccatcaatggaagtttcacagactaccttcggaaggtgtggaagttcaagaaggaacggaatcacggctacaagcaccacgcagaggacgccctgattatagctaatgccgatttcctgttcaaagaaaacaagaagctgaaagccgtgaacagcgttctggaaaagcctgaaattgagaccaagcaactggatatacaggtggacagcgaggacaactactccgagatgttcatcatccctaaacaggtgcaggacatcaaagacttcagaaatttcaagtacagccacagagtggacaagaaacccaaccggcagctgatcaatgacaccctgtatagcacccgcaagaaggataacagcacctacatcgtccagaccatcaaggacatctacgctaaggacaacaccaccctgaaaaagcaatttgataagtcccccgaaaagtttctgatgtaccaacacgatcctagaaccttcgaaaagttggaggtgatcatgaagcaatatgccaacgagaagaacccactggccaagtaccatgaggagacaggagaatacctgaccaagtattctaagaagaataacggccccatcgtgaagtccctgaagtacattgggaacaaactcggaagccacctggacgtgacgcaccagttcaagagcagcaccaagaagctagtgaaactgagcatcaagaactacagattcgacgtgtacctgacagaaaagggctacaaatttgtgaccatcgcttacctgaatgtgttcaaaaaggacaattattactacatcccaaaggacaagtaccaggagcttaaagagaaaaaaaagatcaaggataccgaccagtttatcgctagcttctacaagaacgacctgattaagctgaacggcgacctgtacaagatcatcggcgtgaactctgacgaccggaacataatagagctggattattatgacatcaagtacaaggactactgcgagatcaacaacatcaagggcgagcctagaatcaaaaagaccatcgggaagaaaaccgagtctatcgaaaagtttacaacagacgtgctgggcaacctgtacctgcacagcacggaaaaggcccctcagctcatcttcaagagaggcctg

SEQ ID NO: 919 - DNA, 3168 bp, synthetic construct
  misc_feature 1..3168: note = Synthetic
  source 1..3168: mol_type = other DNA
aaccagaagtttatcctgggcctggatatcggcatcacatccgtgggctacggcctgattgattacgaaaccaagaacatcattgatgccggcgtccggcttttccctgaagctaacgtggaaaacaatgagggcagacggagcaagagaggcagcagacggctgaagcggagaagaatccatagactcgaacgggtgaagctgctgctgaccgagtacgacctgatcaacaaggagcagatccccaccagcaacaacccataccagatcagagtgaaaggcctttctgagattctgagcaaggatgagctggctatcgctctgctccacctggccaagagaaggggaatccacaacgttgacgtggccgccgataaggaagagaccgccagcgatagcctgagcaccaaggaccagatcaacaagaacgccaagttcctggaaagcagatacgtgtgcgagctgcaaaaagagagactggaaaatgagggccatgtgcggggcgttgagaacagattcctgaccaaagacatcgtcagagaggccaagaaaattattgacacccagatgcagtactatcctgagatagacgagacctttaaggaaaagtacatcagcctggtggaaacaagaagagaatacttcgaaggacctggccagggctcccctttcggctggaacggcgacctgaagaagtggtacgagatgctgatgggccactgcacctacttcccccaggagctgcggagcgtgaagtacgcttacagcgccgacctgttcaatgccctgaacgacctgaacaatcttatcatccaaagagataacagcgagaaattagaataccacgagaagtaccacatcatcgagaatgtgttcaagcaaaagaagaagcctaccctgaagcagatcgccaaagagatcggcgtgaaccctgaggacatcaagggctatcggatcaccaagtccggcacccctgaattcaccagcttcaagctgtttcacgacctcaaaaaggtcgtgaaggaccacgccatcctggacgacatcgatctgctgaatcagatcgccgagatcctgaccatctaccaggacaaggactctatcgtggccgagcttggacagctggagtacctgatgagcgaggctgacaagcagagcatcagcgagctgaccggctacaccggaacccacagcctgtccctgaagtgcatgaacatgatcatcgacgagctgtggcactctagcatgaaccagatggaagtgttcacctacctgaacatgagacctaagaagtacgaactgaagggttaccagagaatcccaaccgacatgatcgacgacgccatcctgagccccgtggtgaagcggacctttatccagagcatcaatgtgatcaacaaggtgatcgagaaatacggcatccccgaggacatcatcatcgaactggccagagagaataactctgatgaccggaagaagttcatcaacaacctgcagaagaagaacgaagccaccagaaagcgcatcaacgagatcatcggccaaacagggaatcagaacgccaagaggatcgtggaaaagattcggctgcacgaccagcaggagggaaaatgcctgtacagcctggaaagcatccccctggaagatctactgaacaaccccaaccactacgaggtggatcacatcatccctagaagcgtgtcctttgacaacagttaccacaacaaggtgctggtgaagcaatccgagaactcgaagaagagcaacctgacaccttaccagtactttaacagcggcaagtccaagctgtcttataaccagttcaagcagcacatcctcaacctgtcaaagtctcaggacagaatctctaagaagaagaaggagtatctgctggaagagcgggacatcaacaagttcgaggtgcagaaagagttcattaacagaaacctggtcgacacccggtacgccacacgcgaactgacaagctacctgaaggcctacttctccgccaacaatatggacgtgaaggtcaagaccatcaatggcagcttcacaaatcacctgagaaaggtctggcggttcgacaagtacagaaaccacggctacaagcaccacgccgaggatgctctgattatcgccaacgccgacttcctgttcaaggaaaacaaaaaactgcagaacaccaacaagatcctggaaaaacctacaatcgagaacaacacaaagaaagtgacagtggaaaaagaggaagattacaacaacgtgtttgagacacctaagctggttgaggatatcaagcagtaccgggactataagtttagccacagagtggacaagaaacctaacaggcagctgatcaacgacactctgtacagcacaagaatgaaagatgagcacgattacatcgtgcagaccattaccgacatctacggcaaggacaacaccaatctgaagaagcagttcaacaaaaatcccgagaagttcctgatgtaccaaaatgaccctaagacattcgagaagctgagcatcatcatgaaacagtactctgatgagaagaacccactggccaagtactacgaggaaacaggcgaatacctgaccaagtactctaagaagaacaacggccctatcgtgaagaagatcaaactgctgggcaacaaagtgggaaatcatctggatgtgaccaataaatacgagaactctacaaagaaactggtgaagctgagcattaagaactacagattcgacgtctacctgacagaaaagggatacaagttcgtgaccatcgcctacctgaacgtgttcaagaaagacaactactactacatcccaaaagacaagtaccaagagttaaaagagaagaagaagataaaggataccgaccagtttatcgcttctttctacaagaacgacctgatcaagctgaacggtgatctgtacaaaatcatcggagtgaatagcgatgacagaaatatcatcgaactggattactatgacatcaagtacaaagattattgtgaaatcaacaacatcaagggagagcccagaattaagaaaaccatcggcaagaaaacagagagcatcgagaaattcaccacagatgtgctgggcaacctgtacctgcacagcacagagaaagcccctcagctcatcttcaagagaggcctg

SEQ ID NO: 920 - DNA, 3162 bp, synthetic construct
  misc_feature 1..3162: note = Synthetic
  source 1..3162: mol_type = other DNA
atgaatcaaaagtttatcctgggtctggacatcggcatcacatctgtgggctacggccttatcgattacgagaccaagaatatcattgatgctggcgtacggctgttccctgaggctaacgtggaaaacaacgagggtagacggagcaagagaggcagcagacggctgaaacggcgtagaatccaccggctggagagagtgaagaagttgctggaagattacaacttgctggatcaatcccagatcccccagagcactaatccttatgctatccgggtgaagggcctgtctgaagccctgagcaaagacgagctggtgattgccctgctgcacatcgcgaagagaagaggcatccacaatatcaatgtgtcctctgaggatgaggatgccagcaacgagctgagcactaaggaacagatcaatcggaacaacaagctgctgaaggacaagtacgtgtgtgaagtgcagctgcagagactgaaggaaggccagataagaggcgaaaagaacagattcaagacaacagacatcctgaaagaaatcgaccagctgctgaaggtccagaaggactaccacaacctcgacatcgatttcattaaccagtacaaggaaatcgtggaaaccaggagagagtacttcgagggccctggcaagggctccccatacggctgggagggcgaccccaaggcctggtacgaaaccctgatgggccactgcacctacttccccgacgaactgagaagcgtcaagtacgcctacagcgccgatctgttcaacgccctgaacgacctgaacaacctggtgatccagcgggacggcctgagcaaactggagtaccatgaaaagtatcatatcatcgagaacgtgttcaagcagaagaaaaaacctaccctgaagcagatcgccaacgagatcaacgtgaaccctgaggacattaaaggctacagaatcaccaaaagcggcaagccagagttcaccagcttcaagctgtttcacgacctgaagaaggtcgtgaaagaccacgccatcctggacgacatcgatctgcttaaccagatcgctgaaatcctcacaatctaccaggacaaggactctatcgtggccgagctgggacagctggaatacctgatgagcgaggccgataagcagagcatcagcgagctgaccggctacaccggaacccacagcctgagcctgaagtgtatgaacatgatcatcgacgagctgtggcacagctctatgaaccagatggaagtattcacctacctgaacatgagacctaagaagtacgaactgaagggctatcagagaatccctacagacatgatcgacgatgccatcctgtctcctgtggtgaagagaaccttcatccagtctatcaacgtgatcaacaaggtgatcgaaaagtacggaatccctgaagatatcatcatcgaactggccagagagaacaactccgacgacagaaagaaattcatcaacaacctgcagaagaagaatgaggccacacggaagcggattaatgagatcatcggccaaaccggcaaccagaacgccaaaagaatcgtggaaaagatccggctgcacgatcagcaggagggcaaatgcctgtacagcctggagagcatccccctggaggacctgctcaacaaccccaaccactacgaggtggatcacatcatcccaagatctgttagcttcgacaacagctaccacaacaaggtgctggtgaagcaaagcgaaaactctaagaaatctaacctgacaccttaccagtactttaacagcggcaagtccaagctgtcttataaccagtttaagcagcacatcctgaacctgagcaagtcccaggatagaatcagcaaaaaaaagaaggaatacctgctggaggaacgcgacatcaataaatttgaggtgcaaaaggagttcatcaaccggaacctggtggacacccggtacgccaccagagaactgaccaactacctgaaagcctacttcagcgccaacaacatgaacgtgaaggtgaaaaccatcaacggaagcttcaccgactacctgcggaaggtgtggaagttcaagaaagagcggaatcacggctataagcaccacgctgaggacgctctgatcatcgccaatgccgatttcctgttcaaggaaaacaagaagttaaaggccgtgaactctgtcctggagaagcccgagatcgagacaaagcagctggacatccaagtggactcagaggacaattactctgagatgttcatcatccccaagcaggtgcaggacatcaaggattttagaaatttcaagtacagccatagagtggacaagaagcccaatagacagctgatcaacgatacactgtacagcaccagaaagaaggacaacagcacatatatcgtccagaccatcaaggacatttacgcaaaggataacaccacactgaagaagcagttcgacaaaagccctgagaagttcctgatgtaccaacacgaccctcggaccttcgagaagttagaggttatcatgaaacagtacgccaacgagaaaaaccctctggccaagtaccacgaggaaaccggagaatacctgacaaaatatagcaagaagaacaacggccccatcgtgaaaagcctgaagtacatcggcaacaagctgggcagccacctggacgtgacccaccagttcaagagcagcaccaagaagctggtcaagctgagcatcaagccttataggttcgacgtgtacctgacagataagggatacaagttcatcaccatcagctacctggatgttctgaaaaaggacaattactactacatccctgagcagaagtacgacaaactcaagctgggcaaggccatcgataagaatgccaagttcatcgcatctttttacaagaacgacctgatcaaactggacggcgagatctacaagatcataggagtgaacagcgacaccaggaatatgatcgagctcgatctgcctgacatcagatacaaggaatactgcgagctgaacaacatcaagggagagcctagaatcaagaaaaccatcggcaagaaggtgaacagcatcgagaaacttacaacagatgtgctcggcaacgtgttcaccaacacccagtacaccaagccacagctgctgtttaagcgggggaac

SEQ ID NO: 921 - DNA, 53 bp, synthetic construct
  misc_feature 1..53: note = Synthetic
  source 1..53: mol_type = other DNA
aatgatacggcgaccaccgagatctacactatagtagcttcgtcggcagcgtc

SEQ ID NO: 922 - DNA, 88 bp, synthetic construct
  misc_feature 1..88: note = Synthetic
  misc_feature 24..25: note = site of variable i7 barcode
  source 1..88: mol_type = other DNA
caagcagaagacggcatacgagatgtctcgtgggctcggcaagcagaagacggcatacgagatnnnnnnnnnngtctcgtgggctcgg

SEQ ID NO: 923 - skipped

SEQ ID NO: 924 - DNA, 22 bp, synthetic construct
  misc_feature 1..22: note = Synthetic
  source 1..22: mol_type = other DNA
catttggattgcatctactgta

SEQ ID NO: 925 - DNA, 22 bp, synthetic construct
  misc_feature 1..22: note = Synthetic
  source 1..22: mol_type = other DNA
cctttggattgcatctactgta

SEQ ID NO: 926 - DNA, 22 bp, synthetic construct
  misc_feature 1..22: note = Synthetic
  source 1..22: mol_type = other DNA
cgtttggattgcatctactgta

SEQ ID NO: 927 - DNA, 22 bp, synthetic construct
  misc_feature 1..22: note = Synthetic
  source 1..22: mol_type = other DNA
ctattggattgcatctactgta

SEQ ID NO: 928 - DNA, 22 bp, synthetic construct
  misc_feature 1..22: note = Synthetic
  source 1..22: mol_type = other DNA
ctcttggattgcatctactgta

SEQ ID NO: 929 - DNA, 22 bp, synthetic construct
  misc_feature 1..22: note = Synthetic
  source 1..22: mol_type = other DNA
ctgttggattgcatctactgta

SEQ ID NO: 930 - DNA, 22 bp, synthetic construct
  misc_feature 1..22: note = Synthetic
  source 1..22: mol_type = other DNA
cttatggattgcatctactgta

SEQ ID NO: 931 - DNA, 22 bp, synthetic construct
  misc_feature 1..22: note = Synthetic
  source 1..22: mol_type = other DNA
cttctggattgcatctactgta

SEQ ID NO: 932 - DNA, 22 bp, synthetic construct
  misc_feature 1..22: note = Synthetic
  source 1..22: mol_type = other DNA
cttgtggattgcatctactgta

SEQ ID NO: 933 - DNA, 22 bp, synthetic construct
  misc_feature 1..22: note = Synthetic
  source 1..22: mol_type = other DNA
ctttaggattgcatctactgta

SEQ ID NO: 934 - DNA, 22 bp, synthetic construct
  misc_feature 1..22: note = Synthetic
  source 1..22: mol_type = other DNA
ctttcggattgcatctactgta

SEQ ID NO: 935 - DNA, 22 bp, synthetic construct
  misc_feature 1..22: note = Synthetic
  source 1..22: mol_type = other DNA
ctttgggattgcatctactgta

SEQ ID NO: 936 - DNA, 20 bp, synthetic construct
  misc_feature 1..20: note = Synthetic
  source 1..20: mol_type = other DNA
tttggattgcatctactgta

SEQ ID NO: 937 - DNA, 21 bp, synthetic construct
  misc_feature 1..21: note = Synthetic
  source 1..21: mol_type = other DNA
ctttggattgcatctactgta

SEQ ID NO: 938 - DNA, 22 bp, synthetic construct
  misc_feature 1..22: note = Synthetic
  source 1..22: mol_type = other DNA
actttggattgcatctactgta

SEQ ID NO: 939 - DNA, 144 bp, synthetic construct
  misc_feature 1..144: note = Synthetic
  source 1..144: mol_type = other DNA
cggccactccctctctgcgcgctcgctcgctcactgaggccgggcgaccaaaggtcgcccgacgcccgggctttgcccgggcggcctcagtgagcgagcgagcgcgcagagagggagtggccaactccatcactaggggttcct

SEQ ID NO: 940 - DNA, 138 bp, synthetic construct
  misc_feature 1..138: note = Synthetic
  source 1..138: mol_type = other DNA
aggaacccctagtgatggagttggccactccctctctgcgcgctcgctcgctcactgaggccgggcgaccaaaggtcgcccgacgcccgggctttgcccgggcggcctcagtgagcgagcgagcgcgcagagagggaa

SEQ ID NO: 941 - protein, 1368 aa, synthetic construct [sequence omitted]

SEQ ID NO: 942 - protein, 9 aa, synthetic construct
  REGION 1..9: note = Synthetic
PAAKKKKLD

SEQ ID NO: 943-7020 - skipped (6078 entries)

SEQ ID NO: 7021 - protein, 1057 aa, synthetic construct
  REGION 1..1057: note = Synthetic
MNQKFILGLDIGITSVGYGLIDYETKNIIDAGVRLFPEANVENNEGRRSKRGSRRLKRRRIHRLDRVKHLLAEYDLLDLTNIPKSTNPYQTRVKGLNEKLSKDELVIALLHIAKRRGIHNVDVAADKEETASDSLSTKDQINKNAKFLESRYVCELQKERLENEGHVRGVENRFLTKDIVREAKKIIDTQMQYYPEIDETFKEKYISLVETRREYFEGPGKGSPFGWEGNIKKWFEQMMGHCTYFPEELRSVKYSYSAELFNALNDLNNLVITRDEDAKLNYGEKFQIIENVFKQKKTPNLKQIAIEIGVHETEIKGYRVNKSGTPEFTEFKLYHDLKSIVFDKSILENEAILDQIAEILTIYQDEQSIKEELNKLPEILNEQDKAEIAKLIGYNGTHRLSLKCIHLINEELWQTSRNQMEIFNYLNIKPNKVDLSEQNKIPKDMVNDFILSPVVKRTFIQSINVINKVIEKYGIPEDIIIELARENNSDDRKKFINNLQKKNEATRKRINEIIGQTGNQNAKRIVEKIRLHDQQEGKCLYSLKDIPLEDLLRNPNNYDIDHIIPRSVSFDDSMHNKVLVRREQNAKKNNQTPYQYLTSGYADIKYSVFKQHVLNLAENKDRMTKKKREYLLEERDINKFEVQKEFINRNLVDTRYATRELTNYLKAYFSANNMNVKVKTINGSFTDYLRKVWKFKKERNHGYKHHAEDALIIANADFLFKENKKLKAVNSVLEKPEIETKQLDIQVDSEDNYSEMFIIPKQVQDIKDFRNFKYSHRVDKKPNRQLINDTLYSTRKKDNSTYIVQTIKDIYAKDNTTLKKQFDKSPEKFLMYQHDPRTFEKLEVIMKQYANEKNPLAKYHEETGEYLTKYSKKNNGPIVKSLKYIGNKLGSHLDVTHQFKSSTKKLVKLSIKPYRFDVYLTDKGYKFITISYLDVLKKDNYYYIPEQKYDKLKLGKAIDKNAKFIASFYKNDLIKLDGEIYKIIGVNSDTRNMIELDLPDIRYKEYCELNNIKGEPRIKKTIGKKVNSIEKLTTDVLGNVFTNTQYTKPQLLFKRGN

SEQ ID NO: 7022 - protein, 1053 aa, synthetic construct
  REGION 1..1053: note = Synthetic
MNQKFILGLDIGITSVGYGLIDYETKNIIDAGVRLFPEANVENNEGRRSKRGSRRLKRRRIHRLERVKSLLSEYKIISGLAPTNNQPYNIRVKGLTEQLTKDELAVALLHIAKRRGIHKIDVIDSNDDVGNELSTKEQLNKNSKLLKDKFVCQIQLERMNEGQVRGEKNRFKTADIIKEIIQLLNVQKNFHQLDENFINKYIELVEMRREYFEGPGQGSPFGWNGDLKKWYEMLMGHCTYFPQELRSVKYAYSADLFNALNDLNNLIIQRDNSEKLEYHEKYHIIENVFKQKKKPTLKQIAKEIGVNPEDIKGYRITKSGTPEFTEFKLYHDLKSVLFDQSILENEDVLDQIAEILTIYQDKDSIKSKLTELDILLNEEDKENIAQLTGYNGTHRLSLKCIRLVLEEQWYSSRNQMEIFTHLNIKPKKINLTAANKIPKAMIDEFILSPVVKRTFIQSINVINKVIEKYGIPEDIIIELARENNSDDRKKFINNLQKKNEATRKRINEIIGQTGNQNAKRIVEKIRLHDQQEGKCLYSLESIALMDLLNNPQNYEVDHIIPRSVAFDNSIHNKVLVKQIENSKKGNRTPYQYLNSSDAKLSYNQFKQHILNLSKSKDRISKKKKDYLLEERDINKFEVQKEFINRNLVDTRYATRELTSYLKAYFSANNMDVKVKTINGSFTNHLRKVWRFDKYRNHGYKHHAEDALIIANADFLFKENKKLKAVNSVLEKPEIETKQLDIQVDSEDNYSEMFIIPKQVQDIKDFRNFKYSHRVDKKPNRQLINDTLYSTRKKDNSTYIVQTIKDIYAKDNTTLKKQFDKSPEKFLMYQHDPRTFEKLEVIMKQYANEKNPLAKYHEETGEYLTKYSKKNNGPIVKSLKYIGNKLGSHLDVTHQFKSSTKKLVKLSIKPYRFDVYLTDKGYKFITISYLDVLKKDNYYYIPEQKYDKLKLGKAIDKNAKFIASFYKNDLIKLDGEIYKIIGVNSDTRNMIELDLPDIRYKEYCELNNIKGEPRIKKTIGKKVNSIEKLTTDVLGNVFTNTQYTKPQLLFKRGN

SEQ ID NO: 7023 - protein, 1057 aa, synthetic construct
  REGION 1..1057: note = Synthetic
MNQKFILGLDIGITSVGYGLIDYETKNIIDAGVRLFPEANVENNEGRRSKRGSRRLKRRRIHRLERVKLLLTEYDLINKEQIPTSNNPYQIRVKGLSEILSKDELAIALLHLAKRRGIHNVDVAADKEETASDSLSTKDQINKNAKFLESRYVCELQKERLENEGHVRGVENRFLTKDIVREAKKIIDTQMQYYPEIDETFKEKYISLVETRREYFEGPGQGSPFGWNGDLKKWYEMLMGHCTYFPQELRSVKYAYSADLFNALNDLNNLIIQRDNSEKLEYHEKYHIIENVFKQKKKPTLKQIAKEIGVNPEDIKGYRITKSGTPEFTSFKLFHDLKKVVKDHAILDDIDLLNQIAEILTIYQDKDSIVAELGQLEYLMSEADKQSISELTGYTGTHSLSLKCMNMIIDELWHSSMNQMEVFTYLNMRPKKYELKGYQRIPTDMIDDAILSPVVKRTFIQSINVINKVIEKYGIPEDIIIELARENNSDDRKKFINNLQKKNEATRKRINEIIGQTGNQNAKRIVEKIRLHDQQEGKCLYSLESIPLEDLLNNPNHYEVDHIIPRSVSFDNSYHNKVLVKQSENSKKSNLTPYQYFNSGKSKLSYNQFKQHILNLSKSQDRISKKKKEYLLEERDINKFEVQKEFINRNLVDTRYATRELTNYLKAYFSANNMNVKVKTINGSFTDYLRKVWKFKKERNHGYKHHAEDALIIANADFLFKENKKLKAVNSVLEKPEIETKQLDIQVDSEDNYSEMFIIPKQVQDIKDFRNFKYSHRVDKKPNRQLINDTLYSTRKKDNSTYIVQTIKDIYAKDNTTLKKQFDKSPEKFLMYQHDPRTFEKLEVIMKQYANEKNPLAKYHEETGEYLTKYSKKNNGPIVKSLKYIGNKLGSHLDVTHQFKSSTKKLVKLSIKPYRFDVYLTDKGYKFITISYLDVLKKDNYYYIPEQKYDKLKLGKAIDKNAKFIASFYKNDLIKLDGEIYKIIGVNSDTRNMIELDLPDIRYKEYCELNNIKGEPRIKKTIGKKVNSIEKLTTDVLGNVFTNTQYTKPQLLFKRGN

SEQ ID NO: 7024 - protein, 1057 aa, synthetic construct
  REGION 1..1057: note = Synthetic
MNQKFILGLDIGITSVGYGLIDYETKNIIDAGVRLFPEANVENNEGRRSKRGSRRLKRRRIHRLERVKLLLTEYDLINKEQIPTSNNPYQIRVKGLSEILSKDELAIALLHLAKRRGIHNVDVAADKEETASDSLSTKDQINKNAKFLESRYVCELQKERLENEGHVRGVENRFLTKDIVREAKKIIDTQMQYYPEIDETFKEKYISLVETRREYFEGPGQGSPFGWNGDLKKWYEMLMGHCTYFPQELRSVKYAYSADLFNALNDLNNLIIQRDNSEKLEYHEKYHIIENVFKQKKKPTLKQIAKEIGVNPEDIKGYRITKSGTPEFTSFKLFHDLKKVVKDHAILDDIDLLNQIAEILTIYQDKDSIVAELGQLEYLMSEADKQSISELTGYTGTHSLSLKCMNMIIDELWHSSMNQMEVFTYLNMRPKKYELKGYQRIPTDMIDDAILSPVVKRTFIQSINVINKVIEKYGIPEDIIIELARENNSDDRKKFINNLQKKNEATRKRINEIIGQTGNQNAKRIVEKIRLHDQQEGKCLYSLESIPLEDLLNNPNHYEVDHIIPRSVSFDNSYHNKVLVKQSENSKKSNLTPYQYFNSGKSKLSYNQFKQHILNLSKSQDRISKKKKEYLLEERDINKFEVQKEFINRNLVDTRYATRELTNYLKAYFSANNMNVKVKTINGSFTDYLRKVWKFKKERNHGYKHHAEDALIIANADFLFKENKKLKAVNSVLEKPEIETKQLDIQVDSEDNYSEMFIIPKQVQDIKDFRNFKYSHRVDKKPNRQLINDTLYSTRKKDNSTYIVQTIKDIYAKDNTTLKKQFDKSPEKFLMYQHDPRTFEKLEVIMKQYANEKNPLAKYHEETGEYLTKYSKKNNGPIVKSLKYIGNKLGSHLDVTHQFKSSTKKLVKLSIKNYRFDVYLTEKGYKFVTIAYLNVFKKDNYYYIPKDKYQELKEKKKIKDTDQFIASFYKNDLIKLNGDLYKIIGVNSDDRNIIELDYYDIKYKDYCEINNIKGEPRIKKTIGKKTESIEKFTTDVLGNLYLHSTEKAPQLIFKRGL

SEQ ID NO: 7025 - protein, 1057 aa, synthetic construct
  REGION 1..1057: note = Synthetic
MNQKFILGLDIGITSVGYGLIDYETKNIIDAGVRLFPEANVENNEGRRSKRGSRRLKRRRIHRLERVKLLLTEYDLINKEQIPTSNNPYQIRVKGLSEILSKDELAIALLHLAKRRGIHNVDVAADKEETASDSLSTKDQINKNAKFLESRYVCELQKERLENEGHVRGVENRFLTKDIVREAKKIIDTQMQYYPEIDETFKEKYISLVETRREYFEGPGQGSPFGWNGDLKKWYEMLMGHCTYFPQELRSVKYAYSADLFNALNDLNNLIIQRDNSEKLEYHEKYHIIENVFKQKKKPTLKQIAKEIGVNPEDIKGYRITKSGTPEFTSFKLFHDLKKVVKDHAILDDIDLLNQIAEILTIYQDKDSIVAELGQLEYLMSEADKQSISELTGYTGTHSLSLKCMNMIIDELWHSSMNQMEVFTYLNMRPKKYELKGYQRIPTDMIDDAILSPVVKRTFIQSINVINKVIEKYGIPEDIIIELARENNSDDRKKFINNLQKKNEATRKRINEIIGQTGNQNAKRIVEKIRLHDQQEGKCLYSLESIPLEDLLNNPNHYEVDHIIPRSVSFDNSYHNKVLVKQSENSKKSNLTPYQYFNSGKSKLSYNQFKQHILNLSKSQDRISKKKKEYLLEERDINKFEVQKEFINRNLVDTRYATRELTNYLKAYFSANNMNVKVKTINGSFTDYLRKVWKFKKERNHGYKHHAEDALIIANADFLFKENKKLKAVNSVLEKPEIETKQLDIQVDSEDNYSEMFIIPKQVQDIKDFRNFKFSHRVDKKPNRQLINDTLYSTRMKDEHDYIVQTITDIYGKDNTNLKKQFNKNPEKFLMYQNDPKTFEKLSIIMKQYSDEKNPLAKYYEETGEYLTKYSKKNNGPIVKKIKLLGNKVGNHLDVTNKYENSTKKLVKLSIKNYRFDVYLTEKGYKFVTIAYLNVFKKDNYYYIPKDKYQELKEKKKIKDTDQFIASFYKNDLIKLNGDLYKIIGVNSDDRNIIELDYYDIKYKDYCEINNIKGEPRIKKTIGKKTESIEKFTTDVLGNLYLHSTEKAPQLIFKRGL

SEQ ID NO: 7026 - protein, 1057 aa, synthetic construct
  REGION 1..1057: note = Synthetic
MNQKFILGLDIGITSVGYGLIDYETKNIIDAGVRLFPEANVENNEGRRSKRGSRRLKRRRIHRLERVKLLLTEYDLINKEQIPTSNNPYQIRVKGLSEILSKDELAIALLHLAKRRGIHNVDVAADKEETASDSLSTKDQINKNAKFLESRYVCELQKERLENEGHVRGVENRFLTKDIVREAKKIIDTQMQYYPEIDETFKEKYISLVETRREYFEGPGQGSPFGWNGDLKKWYEMLMGHCTYFPQELRSVKYAYSADLFNALNDLNNLIIQRDNSEKLEYHEKYHIIENVFKQKKKPTLKQIAKEIGVNPEDIKGYRITKSGTPEFTSFKLFHDLKKVVKDHAILDDIDLLNQIAEILTIYQDKDSIVAELGQLEYLMSEADKQSISELTGYTGTHSLSLKCMNMIIDELWHSSMNQMEVFTYLNMRPKKYELKGYQRIPTDMIDDAILSPVVKRTFIQSINVINKVIEKYGIPEDIIIELARENNSDDRKKFINNLQKKNEATRKRINEIIGQTGNQNAKRIVEKIRLHDQQEGKCLYSLESIPLEDLLNNPNHYEVDHIIPRSVSFDNSYHNKVLVKQSENSKKSNLTPYQYFNSGKSKLSYNQFKQHILNLSKSQDRISKKKKEYLLEERDINKFEVQKEFINRNLVDTRYATRELTSYLKAYFSANNMDVKVKTINGSFTNHLRKVWRFDKYRNHGYKHHAEDALIIANADFLFKENKKLQNTNKILEKPTIENNTKKVTVEKEEDYNNVFETPKLVEDIKQYRDYKFSHRVDKKPNRQLINDTLYSTRMKDEHDYIVQTITDIYGKDNTNLKKQFNKNPEKFLMYQNDPKTFEKLSIIMKQYSDEKNPLAKYYEETGEYLTKYSKKNNGPIVKKIKLLGNKVGNHLDVTNKYENSTKKLVKLSIKNYRFDVYLTEKGYKFVTIAYLNVFKKDNYYYIPKDKYQELKEKKKIKDTDQFIASFYKNDLIKLNGDLYKIIGVNSDDRNIIELDYYDIKYKDYCEINNIKGEPRIKKTIGKKTESIEKFTTDVLGNLYLHSTEKAPQLIFKRGL

SEQ ID NO: 7027 - protein, 1054 aa, synthetic construct
  REGION 1..1054: note = Synthetic
MNQKFILGLDIGITSVGYGLIDYETKNIIDAGVRLFPEANVENNEGRRSKRGSRRLKRRRIHRLERVKKLLEDYNLLDQSQIPQSTNPYAIRVKGLSEALSKDELVIALLHIAKRRGIHNINVSSEDEDASNELSTKEQINRNNKLLKDKYVCEVQLQRLKEGQIRGEKNRFKTTDILKEIDQLLKVQKDYHNLDIDFINQYKEIVETRREYFEGPGKGSPYGWEGDPKAWYETLMGHCTYFPDELRSVKYAYSADLFNALNDLNNLVIQRDGLSKLEYHEKYHIIENVFKQKKKPTLKQIANEINVNPEDIKGYRITKSGKPEFTSFKLFHDLKKVVKDHAILDDIDLLNQIAEILTIYQDKDSIVAELGQLEYLMSEADKQSISELTGYTGTHSLSLKCMNMIIDELWHSSMNQMEVFTYLNMRPKKYELKGYQRIPTDMIDDAILSPVVKRTFIQSINVINKVIEKYGIPEDIIIELARENNSDDRKKFINNLQKKNEATRKRINEIIGQTGNQNAKRIVEKIRLHDQQEGKCLYSLESIPLEDLLNNPNHYEVDHIIPRSVSFDNSYHNKVLVKQSENSKKSNLTPYQYFNSGKSKLSYNQFKQHILNLSKSQDRISKKKKEYLLEERDINKFEVQKEFINRNLVDTRYATRELTNYLKAYFSANNMNVKVKTINGSFTDYLRKVWKFKKERNHGYKHHAEDALIIANADFLFKENKKLKAVNSVLEKPEIETKQLDIQVDSEDNYSEMFIIPKQVQDIKDFRNFKYSHRVDKKPNRQLINDTLYSTRKKDNSTYIVQTIKDIYAKDNTTLKKQFDKSPEKFLMYQHDPRTFEKLEVIMKQYANEKNPLAKYHEETGEYLTKYSKKNNGPIVKSLKYIGNKLGSHLDVTHQFKSSTKKLVKLSIKPYRFDVYLTDKGYKFITISYLDVLKKDNYYYIPEQKYDKLKLGKAIDKNAKFIASFYKNDLIKLDGEIYKIIGVNSDTRNMIELDLPDIRYKEYCELNNIKGEPRIKKTIGKKVNSIEKLTTDVLGNVFTNTQYTKPQLLFKRGN

SEQ ID NO: 7028 - protein, 1051 aa, Staphylococcus hyicus
  REGION 1..1051: note = misc_feature - Staphylococcus hyicus Cas9 or ShyCas9
MNNYILGLDIGITSVGYGIVDSDTREIKDAGVRLFPEANVDNNEGRRSKRGARRLKRRRIHRLDRVKHLLAEYDLLDLTNIPKSTNPYQTRVKGLNEKLSKDELVIALLHIAKRRGIHNVNVMMDDNDSGNELSTKDQLKKNAKALSDKYVCELQLERFEQDYKVRGEKNRFKTEDFVREARKLLETQSKFFEIDQTFIMRYIELIETRREYFEGPGKGSPFGWEGNIKKWFEQMMGHCTYFPEELRSVKYSYSAELFNALNDLNNLVITRDEDAKLNYGEKFQIIENVFKQKKTPNLKQIAIEIGVHETEIKGYRVNKSGKPEFTQFKLYHDLKNIFKDPKYLNDIQLMDNIAEIITIYQDAESIIKELNQLPELLSEREKEKISALSGYSGTHRLSLKCINLLLDDLWESSLNQMELFTKLNLKPKKIDLSQQHKIPSKLVDDFILSPVVKRAFIQSIQVVNAIIDKYGLPEDIIIELARENNSDDRRKFLNQLQKQNEETRKQVEKVLREYGNDNAKRIVQKIKLHNMQEGKCLYSLKDIPLEDLLRNPHHYEVDHIIPRSVAFDNSMHNKVLVRADENSKKGNRTPYQYLNSSESSLSYNEFKQHILNLSKTKDRITKKKREYLLEERDINKFDVQKEFINRNLVDTRYATRELTSLLKAYFSANNLDVKVKTINGSFTNYLRKVWKFDKDRNKGYKHHAEDALIIANADFLFKHNKKLRNINKVLDAPSKEVDKKRVTVQSEDEYNQIFEDTQKAQAIKKFEIRKFSHRVDKKPNRQLINDTLYSTRNIDGIEYVVESIKDIYSVNNDKVKTKFKKDPHRLLMYRNDPQTFEKFEKVFKQYESEKNPFAKYYEETGEKIRKFSKTGQGPYINKIKYLRERLGRHCDVTNKYINSRNKIVQLKIYSYRFDIYQYGNNYKMITISYIDLEQKSNYYYISREKYEQKKKDKQIDDSYKFIGSFYKNDIINYNGEMYRVIGVNDSEKNKIQLDMIDISIKDYMELNNIKKTGVIYKTIGKSTTHIEKYTTDILGNLYKAAPPKKPQLIFK

SEQ ID NO: 7029 - protein, 1052 aa, Staphylococcus microti
  REGION 1..1052: note = misc_feature - Staphylococcus microti Cas9 or Smi Cas9
MEKDYILGLDIGIGSVGYGLIDYDTKSIIDAGVRLFPEANADNNLGRRAKRGARRLKRRRIHRLERVKSLLSEYKIISGLAPTNNQPYNIRVKGLTEQLTKDELAVALLHIAKRRGIHNVDVAADKEETASDSLSTKDQINKNAKFLESRYVCELQKERLENEGHVRGVENRFLTKDIVREAKKIIDTQMQYYPEIDETFKEKYISLVETRREYYEGPGKGSPYGWDADVKKWYQLMMGHCTYFPVEFRSVKYAYTADLYNALNDLNNLTIARDDNPKLEYHEKYHIIENVFKQKRNPTLKQIAKEIGVNDINISGYRVTKSGKPQFTSFKLFHDLKKVVKDHAILDDIDLLNQIAEILTIYQDKDSIVAELGQLEYLMSEADKQSISELTGYTGTHSLSLKCMNMIIDELWHSSMNQMEVFTYLNMRPKKYELKGYQRIPTDMIDDAILSPVVKRSFKQAIGVVNAIIKKYGLPKDIIIELARESNSAEKSRYLRAIQKKNEKTRERIEAIIKEYGNENAKGLVQKIKLHDAQEGKCLYSLKDIPLEDLLRNPNNYDIDHIIPRSVSFDDSMHNKVLVRREQNAKKNNQTPYQYLTSGYADIKYSVFKQHVLNLAENKDRMTKKKREYLLEERNINKYDVQKEFINRNLVDTRYTTRELTTLLKTYFTINNLDVKVKTINGSFTDFLRKRWGFKKNRDEGYKHHAEDALIIANADYLFKEHKLLKEIKDVSDLAGDERNSNVKDEDQYEEVFGGYFKIEDIKKYKIKKFSHRVDKKPNRQLINDTIYSTRVKDDKRYLINTLKNLYDKSNGDLKERMQKDPESLLMYHHDPQTFEKLKIVMSQYENEKNPLAKYFEETGQYLTKYAKHDNGPAIHKIKYYGNKLVEHLDITKNYHNPQNKVVQLSQKSFRFDVYQTDKGYKFISIAYLTLKNEKNYYAISQEKYDQLKSEKKISNNAVFIGSFYTSDIIEINNEKFRVIGVNSDKNNLIEVDRIDIRQKEFIELEEEKKNNRIKVTIGRKTTNIEKFHTDILGNMYKSKRPKAPQLVFKKG

SEQ ID NO: 7030 - protein, 1054 aa, Staphylococcus pasteuri
  REGION 1..1054: note = misc_feature - Staphylococcus pasteuri Cas9 or Spa Cas9
MKEKYILGLDLGITSVGYGIINFETKKIIDAGVRLFPEANVDNNEGRRSKRGSRRLKRRRIHRLERVKLLLTEYDLINKEQIPTSNNPYQIRVKGLSEILSKDELAIALLHLAKRRGIHNINVSSEDEDASNELSTKEQINRNNKLLKDKYVCEVQLQRLKEGQIRGEKNRFKTTDILKEIDQLLKVQKDYHNLDIDFINQYKEIVETRREYFEGPGQGSPFGWNGDLKKWYEMLMGHCTYFPQELRSVKYAYSADLFNALNDLNNLIIQRDNSEKLEYHEKYHIIENVFKQKKKPTLKQIAKEIGVNPEDIKGYRITKSGTPQFTEFKLYHDLKSIVFDKSILENEAILDQIAEILTIYQDEQSIKEELNKLPEILNEQDKAEIAKLIGYNGTHRLSLKCIHLINEELWQTSRNQMEIFNYLNIKPNKVDLSEQNKIPKDMVNDFILSPVVKRTFIQSINVINKVIEKYGIPEDIIIELARENNSDDRKKFINNLQKKNEATRKRINEIIGQTGNQNAKRIVEKIRLHDQQEGKCLYSLESIALMDLLNNPQNYEVDHIIPRSVAFDNSIHNKVLVKQIENSKKGNRTPYQYLNSSDAKLSYNQFKQHILNLSKSKDRISKKKKDYLLEERDINKFEVQKEFINRNLVDTRYATRELTSYLKAYFSANNMDVKVKTINGSFTNHLRKVWRFDKYRNHGYKHHAEDALIIANADFLFKENKKLQNTNKILEKPTIENNTKKVTVEKEEDYNNVFETPKLVEDIKQYRDYKFSHRVDKKPNRQLINDTLYSTRMKDEHDYIVQTITDIYGKDNTNLKKQFNKNPEKFLMYQNDPKTFEKLSIIMKQYSDEKNPLAKYYEETGEYLTKYSKKNNGPIVKKIKLLGNKVGNHLDVTNKYENSTKKLVKLSIKNYRFDVYLTEKGYKFVTIAYLNVFKKDNYYYIPKDKYQELKEKKKIKDTDQFIASFYKNDLIKLNGDLYKIIGVNSDDRNIIELDYYDIKYKDYCEINNIKGEPRIKKTIGKKTESIEKFTTDVLGNLYLHSTEKAPQLIFKRGL

SEQ ID NO: 7031 - protein, 1093 aa, synthetic construct
  REGION 1..1093: note = Synthetic
MSNKEKNASETRKAYTTKMIPRSHDRMKLLGNFMDYLMDGTPIFFELWNQFGGGIDRDIISGTANKDKISDDLLLAVNWFKVMPINSKPQGVSPSNLANLFQQYSGSEPDIQAQEYFASNFDTEKHQWKDMRVEYERLLAELQLSRSDMHHDLKLMYKEKCIGLSLSTAHYITSVMFGTGAKNNRQTKHQFYSKVIQLLEESTQINSVEQLASIILKAGDCDSYRKLRIRCSRKGATPSILKIVQDYELGTNHDDEVNVPSLIANLKEKLGRFEYECEWKCMEKIKAFLASKVGPYYLGSYSAMLENALSPIKGMTTKNCKFVLKQIDAKNDIKYENEPFGKIVEGFFDSPYFESDTNVKWVLHPHHIGESNIKTLWEDLNAIHSKYEEDIASLSEDKKEKRIKVYQGDVCQTINTYCEEVGKEAKTPLVQLLRYLYSRKDDIAVDKIIDGITFLSKKHKVEKQKINPVIQKYPSFNFGNNSKLLGKIISPKDKLKHNLKCNRNQVDNYIWIEIKVLNTKTMRWEKHHYALSSTRFLEEVYYPATSENPPDALAARFRTKTNGYEGKPALSAEQIEQIRSAPVGLRKVKKRQMRLEAARQQNLLPRYTWGKDFNINICKRGNNFEVTLATKVKKKKEKNYKVVLGYDANIVRKNTYAAIEAHANGDGVIDYNDLPVKPIESGFVTVESQVRDKSYDQLSYNGVKLLYCKPHVESRRSFLEKYRNGTMKDNRGNNIQIDFMKDFEAIADDETSLYYFNMKYCKLLQSSIRNHSSQAKEYREEIFELLRDGKLSVLKLSSLSNLSFVMFKVAKSLIGTYFGHLLKKPKNSKSDVKAPPITDEDKQKADPEMFALRLALEEKRLNKVKSKKEVIANKIVAKALELRDKYGPVLIKGENISDTTKKGKKSSTNSFLMDWLARGVANKVKEMVMMHQGLEFVEVNPNFTSHQDPFVHKNPENTFRARYSRCTPSELTEKNRKEILSFLSDKPSKRPTNAYYNEGAMAFLATYGLKKNDVLGVSLEKFKQIMANILHQRSEDQLLFPSRGGMFYLATYKLDADATSVNWNGKQFWVCNADLVAAYNVGLVDIQKDFKKK

SEQ ID NO: 7032 - protein, 1054 aa, synthetic construct
  REGION 1..1054: note = Synthetic
MSSAIKSYKSVLRPNERKNQLLKSTIQCLEDGSAFFFKMLQGLFGGITPEIVRFSTEQEKQQQDIALWCAVNWFRPVSQDSLTHTIASDNLVEKFEEYYGGTASDAIKQYFSASIGESYYWNDCRQQYYDLCRELGVEVSDLTHDLEILCREKCLAVATESNQNNSIISVLFGTGEKEDRSVKLRITKKILEAISNLKEIPKNVAPIQEIILNVAKATKETFRQVYAGNLGAPSTLEKFIAKDGQKEFDLKKLQTDLKKVIRGKSKERDWCCQEELRSYVEQNTIQYDLWAWGEMFNKAHTALKIKSTRNYNFAKQRLEQFKEIQSLNNLLVVKKLNDFFDSEFFSGEETYTICVHHLGGKDLSKLYKAWEDDPADPENAIVVLCDDLKNNFKKEPIRNILRYIFTIRQECSAQDILAAAKYNQQLDRYKSQKANPSVLGNQGFTWTNAVILPEKAQRNDRPNSLDLRIWLYLKLRHPDGRWKKHHIPFYDTRFFQEIYAAGNSPVDTCQFRTPRFGYHLPKLTDQTAIRVNKKHVKAAKTEARIRLAIQQGTLPVSNLKITEISATINSKGQVRIPVKFDVGRQKGTLQIGDRFCGYDQNQTASHAYSLWEVVKEGQYHKELGCFVRFISSGDIVSITENRGNQFDQLSYEGLAYPQYADWRKKASKFVSLWQITKKNKKKEIVTVEAKEKFDAICKYQPRLYKFNKEYAYLLRDIVRGKSLVELQQIRQEIFRFIEQDCGVTRLGSLSLSTLETVKAVKGIIYSYFSTALNASKNNPISDEQRKEFDPELFALLEKLELIRTRKKKQKVERIANSLIQTCLENNIKFIRGEGDLSTTNNATKKKANSRSMDWLARGVFNKIRQLAPMHNITLFGCGSLYTSHQDPLVHRNPDKAMKCRWAAIPVKDIGDWVLRKLSQNLRAKNIGTGEYYHQGVKEFLSHYELQDLEEELLKWRSDRKSNIPCWVLQNRLAEKLGNKEAVVYIPVRGGRIYFATHKVATGAVSIVFDQKQVWVCNADHVAAANIALTVKGIGEQSSDEENPDGSRIKLQLTS

SEQ ID NO: 7033-9000 - skipped (1968 entries)

SEQ ID NO: 9001 - DNA, 219 bp, synthetic construct
  misc_feature 1..219: note = Synthetic
  source 1..219: mol_type = other DNA
gagggcctatttcccatgattccttcatatttgcatatacgatacaaggctgttagagagataattggaattaatttgactgtaaacacaaagatataatttcttgggtagtttgcagttttaaaattatgttttaaaatggactatcatatgcttaccgtaacttgaaagtatttcgatttcttggctttatatatcttgtggaaaggacgaaacacc

SEQ ID NO: 9002 - DNA, 189 bp, synthetic construct
  misc_feature 1..189: note = Synthetic
  source 1..189: mol_type = other DNA
gagggcctatttcccatgattccttcatatttgcatatacgatacaaggctgttagagagataattggaattaatttgacgtttgcagttttaaaattatgttttaaaatggactatcatatgcttaccgtaacttgaaagtatttcgatttcttggctttatatatcttgtggaaaggacgaaacacc

SEQ ID NO: 9003 - DNA, 159 bp, synthetic construct
  misc_feature 1..159: note = Synthetic
  source 1..159: mol_type = other DNA
gagggcctatttcccatgattccttcatatttgcatatacgatacaaggctgttagagagataatattatgttttaaaatggactatcatatgcttaccgtaacttgaaagtatttcgatttcttggctttatatatcttgtggaaaggacgaaacacc

SEQ ID NO: 9004 - DNA, 129 bp, synthetic construct
  misc_feature 1..129: note = Synthetic
  source 1..129: mol_type = other DNA
gagggcctatttcccatgattccttcatatttgcatatacgatacaaggcggactatcatatgcttaccgtaacttgaaagtatttcgatttcttggctttatatatcttgtggaaaggacgaaacacc

SEQ ID NO: 9005 - skipped

SEQ ID NO: 9006 - DNA, 213 bp, synthetic construct
  misc_feature 1..213: note = Synthetic
  source 1..213: mol_type = other DNA
ctgcagtatttagcatgccccacccatctgcaaggcattctggatagtgtcaaaacagccggaaatcaagtccgtttatctcaaactttagcatttaaattagattttagttaaatttcctgctgaagctctagtacgataagcaacttgacctaagtgtaaagttgagacttccttcaggtttatatagcttgtgcgccgcttgggtacctc

SEQ ID NO: 9007 - DNA, 183 bp, synthetic construct
  misc_feature 1..183: note = Synthetic
  source 1..183: mol_type = other DNA
ctgcagtatttagcatgccccacccatctgcaaggcattctggatagtgtcaaaacagccggaaatcaagtccgtttatcttaaatttcctgctgaagctctagtacgataagcaacttgacctaagtgtaaagttgagacttccttcaggtttatatagcttgtgcgccgcttgggtacctc

SEQ ID NO: 9008 - DNA, 153 bp, synthetic construct
  misc_feature 1..153: note = Synthetic
  source 1..153: mol_type = other DNA
ctgcagtatttagcatgccccacccatctgcaaggcattctggatagtgtcaaaacagccggaaatagctctagtacgataagcaacttgacctaagtgtaaagttgagacttccttcaggtttatatagcttgtgcgccgcttgggtacctc

SEQ ID NO: 9009 - DNA, 123 bp, synthetic construct
  misc_feature 1..123: note = Synthetic
  source 1..123: mol_type = other DNA
ctgcagtatttagcatgccccacccatctgcaaggcattctggatagtgtcagcaacttgacctaagtgtaaagttgagacttccttcaggtttatatagcttgtgcgccgcttgggtacctc

SEQ ID NO: 9010-9013 - skipped (4 entries)

SEQ ID NO: 9014 - DNA, 3156 bp, synthetic construct
  misc_feature 1..3156: note = Synthetic
  source 1..3156: mol_type = other DNA
aagcgcaattacatcctgggcctggatatcggcatcacctccgtgggctacggcatcatcgactatgagacacgggatgtgatcgacgccggcgtgagactgttcaaggaggccaacgtggagaacaatgagggccggcggagcaagaggggagcaaggcgcctgaagcggagaaggcgccacagaatccagagagtgaagaagctgctgttcgattacaacctgctgaccgaccactccgagctgtctggcatcaatccttatgaggcccgggtgaagggcctgtcccagaagctgtctgaggaggagttttctgccgccctgctgcacctggcaaagaggagaggcgtgcacaacgtgaatgaggtggaggaggacaccggcaacgagctgagcacaaaggagcagatcagccgcaattccaaggccctggaggagaagtatgtggccgagctgcagctggagcggctgaagaaggatggcgaggtgaggggctccatcaatcgcttcaagacctctgactacgtgaaggaggccaagcagctgctgaaggtgcagaaggcctaccaccagctggatcagagctttatcgatacatatatcgacctgctggagaccaggcgcacatactatgagggaccaggagagggctcccccttcggctggaaggacatcaaggagtggtacgagatgctgatgggccactgcacctattttccagaggagctgagatccgtgaagtacgcctataacgccgatctgtacaacgccctgaatgacctgaacaacctggtcatcaccagggatgagaacgagaagctggagtactatgagaagttccagatcatcgagaacgtgttcaagcagaagaagaagcctacactgaagcagatcgccaaggagatcctggtgaacgaggaggacatcaagggctaccgcgtgaccagcacaggcaagccagagttcaccaatctgaaggtgtatcacgatatcaaggacatcacagcccggaaggagatcatcgagaacgccgagctgctggatcagatcgccaagatcctgaccatctatcagagctccgaggacatccaggaggagctgaccaacctgaatagcgagctgacacaggaggagatcgagcagatcagcaatctgaagggctacaccggcacacacaacctgtccctgaaggccatcaatctgatcctggatgagctgtggcacacaaacgacaatcagatcgccatctttaacaggctgaagctggtgccaaagaaggtggacctgagccagcagaaggagatcccaaccacactggtggacgatttcatcctgtcccccgtggtgaagcggagcttcatccagagcatcaaagtgatcaacgccatcatcaagaagtacggcctgcccaatgatatcatcatcgagctggccagggagaagaactctaaggacgcccagaagatgatcaatgagatgcagaagaggaaccgccagaccaatgagcggatcgaggagatcatcagaaccacaggcaaggagaacgccaagtacctgatcgagaagatcaagctgcacgatatgcaggagggcaagtgtctgtatagcctggaggccatccctctggaggacctgctgaacaatccattcaactacgaggtggatcacatcatcccccggagcgtgagcttcgacaattcctttaacaataaggtgctggtgaagcaggaggagaactctaagaagggcaataggacccctttccagtacctgtctagctccgattctaagatcagctacgagaccttcaagaagcacatcctgaatctggccaagggcaagggccgcatctctaagaccaagaaggagtacctgctggaggagcgggacatcaacagattcagcgtgcagaaggacttcatcaaccggaatctggtggacaccagatacgccacacgcggcctgatgaatctgctgcggtcctatttcagagtgaacaatctggatgtgaaggtgaagagcatcaacggcggcttcacctcctttctgcggagaaagtggaagtttaagaaggagagaaacaagggctataagcaccacgccgaggatgccctgatcatcgccaatgccgacttcatctttaaggagtggaagaagctggacaaggccaagaaagtgatggagaaccagatgttcgaggagaagcaggccgagagcatgcccgagatcgagaccgagcaggagtacaaggagattttcatcacacctcaccagatcaagcacatcaaggacttcaaggactacaagtattcccacagggtggataagaagcccaaccgcgagctgatcaatgacaccctgtattctacaaggaaggacgataagggcaataccctgatcgtgaacaatctgaacggcctgtacgacaaggataatgacaagctgaagaagctgatcaacaagagccccgagaagctgctgatgtaccaccacgatcctcagacatatcagaagctgaagctgatcatggagcagtacggcgacgagaagaacccactgtataagtactatgaggagaccggcaactacctgacaaagtattccaagaaggataatggccccgtgatcaagaagatcaagtactatggcaacaagctgaatgcccacctggacatcaccgacgattaccccaacagccggaataaggtggtgaagctgagcctgaagccatacaggttcgacgtgtacctggacaacggcgtgtataagtttgtgacagtgaagaatctggatgtgatcaagaaggagaactactatgaagtgaatagcaagtgctacgaggaggccaagaagctgaagaagatcagcaaccaggccgagttcatcgcctctttttacaacaatgacctgatcaagatcaatggcgagctgtatagagtgatcggcgtgaacaatgatctgctgaaccgcatcgaagtgaatatgatcgacatcacctaccgggagtatctggagaacatgaatgataagaggccccctcgcatcatcaagaccatcgcctctaagacacagagcatcaagaagtactctacagacatcctgggcaacctgtatgaggtgaagagcaagaagcaccctcagatcatcaagaagggc

SEQ ID NO: 9015 - DNA, 22 bp, synthetic construct
  misc_feature 1..22: note = Synthetic
  source 1..22: mol_type = other DNA
cttttggattgcatctactgta

SEQ ID NO: 9016 - DNA, 21 bp, synthetic construct
  misc_feature 1..21: note = Synthetic
  source 1..21: mol_type = other DNA
ttttggattgcatctactgta

SEQ ID NO: 9017 - DNA, 20 bp, synthetic construct
  misc_feature 1..20: note = Synthetic
  source 1..20: mol_type = other DNA
tttggattgcatctactgta

SEQ ID NO: 9018 - DNA, 19 bp, synthetic construct
  misc_feature 1..19: note = Synthetic
  source 1..19: mol_type = other DNA
ttggattgcatctactgta

SEQ ID NO: 9019 - DNA, 18 bp, synthetic construct
  misc_feature 1..18: note = Synthetic
  source 1..18: mol_type = other DNA
tggattgcatctactgta

SEQ ID NO: 9020 - DNA, 17 bp, synthetic construct
  misc_feature 1..17: note = Synthetic
  source 1..17: mol_type = other DNA
ggattgcatctactgta

SEQ ID NO: 9021 - DNA, 16 bp, synthetic construct
  misc_feature 1..16: note = Synthetic
  source 1..16: mol_type = other DNA
gattgcatctactgta

1. A composition comprising one or more guide RNAs or a nucleic acid encoding one or more guide RNAs, wherein the one or more guide RNAs comprise i) a guide sequence of Table 6; ii) at least 16, 17, 18, 19, or 20 contiguous nucleotides of a guide sequence of Table 6; iii) a guide sequence that is at least 90% identical to a guide sequence of Table 6; or iv) any one of the guide sequence pairs shown in Tables 1B, 1D, 3B, 3D, 5B, and 5D, optionally further comprising a SaCas9 or a nucleic acid encoding a SaCas9 (for SEQ ID NOs: 1-159) or a SluCas9 or a nucleic acid encoding a SluCas9 (for SEQ ID NOs: 200-292, 924-938, or 950-955).

2. A composition comprising a pair of guide RNAs or a nucleic acid encoding a pair of guide RNAs, wherein the pair of guide RNAs comprise or consist of a first and a second guide sequence, wherein the first and the second guide sequences are selected from any of the following pairs of guide sequences:
a. For exon 44 with SaCas9, SEQ ID NOs: 1 and 3; 110 and 120; 110 and 121; 110 and 122; 110 and 123; 110 and 124; 110 and 125; 111 and 112; 111 and 113; 111 and 114; 111 and 115; 111 and 116; 111 and 117; 111 and 118; 111 and 119; 111 and 120; 111 and 121; 111 and 122; 111 and 123; 111 and 124; 111 and 125; 112 and 113; 112 and 114; 112 and 115; 112 and 116; 112 and 117; 112 and 118; 112 and 119; 112 and 120; 112 and 121; 112 and 122; 112 and 123; 112 and 124; 112 and 125; 113 and 114; 113 and 115; 113 and 116; 113 and 117; 113 and 118; 113 and 119; 113 and 120; 113 and 121; 113 and 122; 113 and 123; 113 and 124; 113 and 125; 114 and 115; 114 and 116; 114 and 117; 114 and 118; 114 and 119; 114 and 120; 114 and 121; 114 and 122; 114 and 123; 114 and 124; 114 and 125; 115 and 116; 115 and 117; 115 and 118; 115 and 119; 115 and 120; 115 and 121; 115 and 122; 115 and 123; 115 and 124; 115 and 125; 116 and 117; 116 and 118; 116 and 119; 116 and 120; 116 and 121; 116 and 122; 116 and 123; 116 and 124; 116 and 125; 117 and 118; 117 and 119; 117 and 120; 117 and 121; 117 and 122; 117 and 123; 117 and 124; 117 and 125; 118 and 119; 118 and 120; 118 and 121; 118 and 122; 118 and 123; 118 and 124; 118 and 125; 119 and 120; 119 and 121; 119 and 122; 119 and 123; 119 and 124; 119 and 125; 120 and 121; 120 and 122; 120 and 123; 120 and 124; 120 and 125; 121 and 122; 121 and 123; 121 and 124; 121 and 125; 122 and 123; 122 and 124; 122 and 125; 123 and 124; 123 and 125; or 124 and 125;
b. For exon 44 with SluCas9, SEQ ID NOs: 200 and 201; 200 and 202; 200 and 203; 200 and 204; 200 and 205; 200 and 206; 200 and 207; 200 and 208; 201 and 202; 201 and 203; 201 and 204; 201 and 205; 201 and 206; 201 and 207; 201 and 208; 202 and 203; 202 and 204; 202 and 205; 202 and 206; 202 and 207; 202 and 208; 203 and 204; 203 and 205; 203 and 206; 203 and 207; 203 and 208; 204 and 205; 204 and 206; 204 and 207; 204 and 208; 205 and 206; 205 and 207; 205 and 208; 206 and 207; 206 and 208; or 207 and 208;
c. For exon 50 with SaCas9, SEQ ID NOs: 148 and 149; 148 and 150; 148 and 151; 148 and 152; 148 and 153; 148 and 154; 148 and 155; 148 and 156; 148 and 157; 148 and 158; 148 and 159; 149 and 150; 149 and 151; 149 and 152; 149 and 153; 149 and 154; 149 and 155; 149 and 156; 149 and 157; 149 and 158; 149 and 159; 150 and 151; 150 and 152; 150 and 153; 150 and 154; 150 and 155; 150 and 156; 150 and 157; 150 and 158; 150 and 159; 151 and 152; 151 and 153; 151 and 154; 151 and 155; 151 and 156; 151 and 157; 151 and 158; 151 and 159; 152 and 153; 152 and 154; 152 and 155; 152 and 156; 152 and 157; 152 and 158; 152 and 159; 153 and 154; 153 and 155; 153 and 156; 153 and 157; 153 and 158; 153 and 159; 154 and 155; 154 and 156; 154 and 157; 154 and 158; 154 and 159; 155 and 156; 155 and 157; 155 and 158; 155 and 159; 156 and 157; 156 and 158; 156 and 159; 157 and 158; 157 and 159; or 158 and 159;
d. For exon 50 with SluCas9, SEQ ID NOs: 231 and 232; 231 and 233; 231 and 234; 231 and 235; 231 and 236; 231 and 237; 231 and 238; 231 and 239; 231 and 240; 231 and 241; 231 and 242; 232 and 233; 232 and 234; 232 and 235; 232 and 236; 232 and 237; 232 and 238; 232 and 239; 232 and 240; 232 and 241; 232 and 242; 233 and 234; 233 and 235; 233 and 236; 233 and 237; 233 and 238; 233 and 239; 233 and 240; 233 and 241; 233 and 242; 234 and 235; 234 and 236; 234 and 237; 234 and 238; 234 and 239; 234 and 240; 234 and 241; 234 and 242; 235 and 236; 235 and 237; 235 and 238; 235 and 239; 235 and 240; 235 and 241; 235 and 242; 236 and 237; 236 and 238; 236 and 239; 236 and 240; 236 and 241; 236 and 242; 237 and 238; 237 and 239; 237 and 240; 237 and 241; 237 and 242; 238 and 239; 238 and 240; 238 and 241; 238 and 242; 239 and 240; 239 and 241; 239 and 242; 240 and 241; 240 and 242; or 241 and 242;
e. For exon 53 with SaCas9, SEQ ID NOs: 16 and 17; 16 and 18; 16 and 19; 16 and 20; 16 and 21; 16 and 22; 16 and 23; 16 and 24; 16 and 25; 16 and 26; 17 and 18; 17 and 19; 17 and 20; 17 and 21; 17 and 22; 17 and 23; 17 and 24; 17 and 25; 17 and 26; 18 and 19; 18 and 20; 18 and 21; 18 and 22; 18 and 23; 18 and 24; 18 and 25; 18 and 26; 19 and 20; 19 and 21; 19 and 22; 19 and 23; 19 and 24; 19 and 25; 19 and 26; 20 and 21; 20 and 22; 20 and 23; 20 and 24; 20 and 25; 20 and 26; 21 and 22; 21 and 23; 21 and 24; 21 and 25; 21 and 26; 22 and 23; 22 and 24; 22 and 25; 22 and 26; 23 and 24; 23 and 25; 23 and 26; 24 and 25; 24 and 26; 25 and 26; 71 and 72; 71 and 73; 71 and 74; 71 and 75; 71 and 76; 71 and 77; 71 and 78; 71 and 84; 71 and 85; 71 and 86; 71 and 87; 71 and 88; 71 and 89; 71 and 90; 71 and 91; 71 and 92; 71 and 93; 71 and 94; 71 and 95; 71 and 96; 71 and 97; 71 and 98; 71 and 99; 71 and 100; 71 and 101; 71 and 102; 72 and 73; 72 and 74; 72 and 75; 72 and 76; 72 and 77; 72 and 78; 72 and 84; 72 and 85; 72 and 86; 72 and 87; 72 and 88; 72 and 89; 72 and 90; 72 and 91; 72 and 92; 72 and 93; 72 and 94; 72 and 95; 72 and 96; 72 and 97; 72 and 98; 72 and 99; 72 and 100; 72 and 101; 72 and 102; 73 and 74; 73 and 75; 73 and 76; 73 and 77; 73 and 78; 73 and 84; 73 and 85; 73 and 86; 73 and 87; 73 and 88; 73 and 89; 73 and 90; 73 and 91; 73 and 92; 73 and 93; 73 and 94; 73 and 95; 73 and 96; 73 and 97; 73 and 98; 73 and 99; 73 and 100; 73 and 101; 73 and 102; 74 and 75; 74 and 76; 74 and 77; 74 and 78; 74 and 84; 74 and 85; 74 and 86; 74 and 87; 74 and 88; 74 and 89; 74 and 90; 74 and 91; 74 and 92; 74 and 93; 74 and 94; 74 and 95; 74 and 96; 74 and 97; 74 and 98; 74 and 99; 74 and 100; 74 and 101; 74 and 102; 75 and 76; 75 and 77; 75 and 78; 75 and 84; 75 and 85; 75 and 86; 75 and 87; 75 and 88; 75 and 89; 75 and 90; 75 and 91; 75 and 92; 75 and 93; 75 and 94; 75 and 95; 75 and 96; 75 and 97; 75 and 98; 75 and 99; 75 and 100; 75 and 101; 75 and 102; 76 and 77; 76 and 78; 76 and 84; 76 and 85; 76 and 86; 76 and 87; 76 and 88; 76 and 89; 76 and 90; 76 and 91; 76 and 92; 76 and 93; 76 and 94; 76 and 95; 76 and 96; 76 and 97; 76 and 98; 76 and 99; 76 and 100; 76 and 101; 76 and 102; 77 and 78; 77 and 84; 77 and 85; 77 and 86; 77 and 87; 77 and 88; 77 and 89; 77 and 90; 77 and 91; 77 and 92; 77 and 93; 77 and 94; 77 and 95; 77 and 96; 77 and 97; 77 and 98; 77 and 99; 77 and 100; 77 and 101; 77 and 102; 78 and 84; 78 and 85; 78 and 86; 78 and 87; 78 and 88; 78 and 89; 78 and 90; 78 and 91; 78 and 92; 78 and 93; 78 and 94; 78 and 95; 78 and 96; 78 and 97; 78 and 98; 78 and 99; 78 and 100; 78 and 101; 78 and 102; 84 and 85; 84 and 86; 84 and 87; 84 and 88; 84 and 89; 84 and 90; 84 and 91; 84 and 92; 84 and 93; 84 and 94; 84 and 95; 84 and 96; 84 and 97; 84 and 98; 84 and 99; 84 and 100; 84 and 101; 84 and 102; 85 and 86; 85 and 87; 85 and 88; 85 and 89; 85 and 90; 85 and 91; 85 and 92; 85 and 93; 85 and 94; 85 and 95; 85 and 96; 85 and 97; 85 and 98; 85 and 99; 85 and 100; 85 and 101; 85 and 102; 86 and 87; 86 and 88; 86 and 89; 86 and 90; 86 and 91; 86 and 92; 86 and 93; 86 and 94; 86 and 95; 86 and 96; 86 and 97; 86 and 98; 86 and 99; 86 and 100; 86 and 101; 86 and 102; 87 and 88; 87 and 89; 87 and 90; 87 and 91; 87 and 92; 87 and 93; 87 and 94; 87 and 95; 87 and 96; 87 and 97; 87 and 98; 87 and 99; 87 and 100; 87 and 101; 87 and 102; 88 and 89; 88 and 90; 88 and 91; 88 and 92; 88 and 93; 88 and 94; 88 and 95; 88 and 96; 88 and 97; 88 and 98; 88 and 99; 88 and 100; 88 and 101; 88 and 102; 89 and 90; 89 and 91; 89 and 92; 89 and 93; 89 and 94; 89 and 95; 89 and 96; 89 and 97; 89 and 98; 89 and 99; 89 and 100; 89 and 101; 89 and 102; 90 and 91; 90 and 92; 90 and 93; 90 and 94; 90 and 95; 90 and 96; 90 and 97; 90 and 98; 90 and 99; 90 and 100; 90 and 101; 90 and 102; 91 and 92; 91 and 93; 91 and 94; 91 and 95; 91 and 96; 91 and 97; 91 and 98; 91 and 99; 91 and 100; 91 and 101; 91 and 102; 92 and 93; 92 and 94; 92 and 95; 92 and 96; 92 and 97; 92 and 98; 92 and 99; 92 and 100; 92 and 101; 92 and 102; 93 and 94; 93 and 95; 93 and 96; 93 and 97; 93 and 98; 93 and 99; 93 and 100; 93 and 101; 93 and 102; 94 and 95; 94 and 96; 94 and 97; 94 and 98; 94 and 99; 94 and 100; 94 and 101; 94 and 102; 95 and 96; 95 and 97; 95 and 98; 95 and 99; 95 and 100; 95 and 101; 95 and 102; 96 and 97; 96 and 98; 96 and 99; 96 and 100; 96 and 101; 96 and 102; 97 and 98; 97 and 99; 97 and 100; 97 and 101; 97 and 102; 98 and 99; 98 and 100; 98 and 101; 98 and 102; 99 and 100; 99 and 101; 99 and 102; 100 and 101; 100 and 102; or 101 and 102;
f. For exon 53 with SluCas9, SEQ ID NOs: 270 and 271; 270 and 272; 270 and 273; 270 and 274; 270 and 275; 270 and 276; 270 and 277; 270 and 278; 270 and 279; 270 and 280; 270 and 281; 270 and 282; 270 and 283; 270 and 284; 270 and 285; 270 and 286; 270 and 287; 270 and 288; 270 and 289; 270 and 290; 270 and 291; 270 and 292; 271 and 272; 271 and 273; 271 and 274; 271 and 275; 271 and 276; 271 and 277; 271 and 278; 271 and 279; 271 and 280; 271 and 281; 271 and 282; 271 and 283; 271 and 284; 271 and 285; 271 and 286; 271 and 287; 271 and 288; 271 and 289; 271 and 290; 271 and 291; 271 and 292; 272 and 273; 272 and 274; 272 and 275; 272 and 276; 272 and 277; 272 and 278; 272 and 279; 272 and 280; 272 and 281; 272 and 282; 272 and 283; 272 and 284; 272 and 285; 272 and 286; 272 and 287; 272 and 288; 272 and 289; 272 and 290; 272 and 291; 272 and 292; 273 and 274; 273 and 275; 273 and 276; 273 and 277; 273 and 278; 273 and 279; 273 and 280; 273 and 281; 273 and 282; 273 and 283; 273 and 284; 273 and 285; 273 and 286; 273 and 287; 273 and 288; 273 and 289; 273 and 290; 273 and 291; 273 and 292; 274 and 275; 274 and 276; 274 and 277; 274 and 278; 274 and 279; 274 and 280; 274 and 281; 274 and 282; 274 and 283; 274 and 284; 274 and 285; 274 and 286; 274 and 287; 274 and 288; 274 and 289; 274 and 290; 274 and 291; 274 and 292; 275 and 276; 275 and 277; 275 and 278; 275 and 279; 275 and 280; 275 and 281; 275 and 282; 275 and 283; 275 and 284; 275 and 285; 275 and 286; 275 and 287; 275 and 288; 275 and 289; 275 and 290; 275 and 291; 275 and 292; 276 and 277; 276 and 278; 276 and 279; 276 and 280; 276 and 281; 276 and 282; 276 and 283; 276 and 284; 276 and 285; 276 and 286; 276 and 287; 276 and 288; 276 and 289; 276 and 290; 276 and 291; 276 and 292; 277 and 278; 277 and 279; 277 and 280; 277 and 281; 277 and 282; 277 and 283; 277 and 284; 277 and 285; 277 and 286; 277 and 287; 277 and 288; 277 and 289; 277 and 290; 277 and 291; 277 and 292; 278 and 279; 278 and 280; 278 and 281; 278 and 282; 278 and 283; 278 and 284; 278 and 285; 278 and 286; 278 and 287; 278 and 288; 278 and 289; 278 and 290; 278 and 291; 278 and 292; 279 and 280; 279 and 281; 279 and 282; 279 and 283; 279 and 284; 279 and 285; 279 and 286; 279 and 287; 279 and 288; 279 and 289; 279 and 290; 279 and 291; 279 and 292; 280 and 281; 280 and 282; 280 and 283; 280 and 284; 280 and 285; 280 and 286; 280 and 287; 280 and 288; 280 and 289; 280 and 290; 280 and 291; 280 and 292; 281 and 282; 281 and 283; 281 and 284; 281 and 285; 281 and 286; 281 and 287; 281 and 288; 281 and 289; 281 and 290; 281 and 291; 281 and 292; 282 and 283; 282 and 284; 282 and 285; 282 and 286; 282 and 287; 282 and 288; 282 and 289; 282 and 290; 282 and 291; 282 and 292; 283 and 284; 283 and 285; 283 and 286; 283 and 287; 283 and 288; 283 and 289; 283 and 290; 283 and 291; 283 and 292; 284 and 285; 284 and 286; 284 and 287; 284 and 288; 284 and 289; 284 and 290; 284 and 291; 284 and 292; 285 and 286; 285 and 287; 285 and 288; 285 and 289; 285 and 290; 285 and 291; 285 and 292; 286 and 287; 286 and 288; 286 and 289; 286 and 290; 286 and 291; 286 and 292; 287 and 288; 287 and 289; 287 and 290; 287 and 291; 287 and 292; 288 and 289; 288 and 290; 288 and 291; 288 and 292; 289 and 290; 289 and 291; 289 and 292; 290 and 291; 290 and 292; or 291 and 292; 924 and 270; 924 and 272; 924 and 273; 924 and 274; 924 and 275; 924 and 276; 924 and 277; 924 and 278; 924 and 279; 924 and 280; 924 and 281; 924 and 282; 924 and 283; 924 and 284; 924 and 285; 924 and 286; 924 and 287; 924 and 288; 924 and 289; 924 and 290; 924 and 291; 924 and 292; 925 and 270; 925 and 272; 925 and 273; 925 and 274; 925 and 275; 925 and 276; 925 and 277; 925 and 278; 925 and 279; 925 and 280; 925 and 281; 925 and 282; 925 and 283; 925 and 284; 925 and 285; 925 and 286; 925 and 287; 925 and 288; 925 and 289; 925 and 290; 925 and 291; 925 and 292; 926 and 270; 926 and 272; 926 and 273; 926 and 274; 926 and 275; 926 and 276; 926 and 277; 926 and 278; 926 and 279; 926 and 280; 926 and 281; 926 and 282; 926 and 283; 926 and 284; 926 and 285; 926 and 286; 926 and 287; 926 and 288; 926 and 289; 926 and 290; 926 and 291; 926 and 292; 927 and 270; 927 and 272; 927 and 273; 927 and 274; 927 and 275; 927 and 276; 927 and 277; 927 and 278; 927 and 279; 927 and 280; 927 and 281; 927 and 282; 927 and 283; 927 and 284; 927 and 285; 927 and 286; 927 and 287; 927 and 288; 927 and 289; 927 and 290; 927 and 291; 927 and 292; 928 and 270; 928 and 272; 928 and 273; 928 and 274; 928 and 275; 928 and 276; 928 and 277; 928 and 278; 928 and 279; 928 and 280; 928 and 281; 928 and 282; 928 and 283; 928 and 284; 928 and 285; 928 and 286; 928 and 287; 928 and 288; 928 and 289; 928 and 290; 928 and 291; 928 and 292; 929 and 270; 929 and 272; 929 and 273; 929 and 274; 929 and 275; 929 and 276; 929 and 277; 929 and 278; 929 and 279; 929 and 280; 929 and 281; 929 and 282; 929 and 283; 929 and 284; 929 and 285; 929 and 286; 929 and 287; 929 and 288; 929 and 289; 929 and 290; 929 and 291; 929 and 292; 930 and 270; 930 and 272; 930 and 273; 930 and 274; 930 and 275; 930 and 276; 930 and 277; 930 and 278; 930 and 279; 930 and 280; 930 and 281; 930 and 282; 930 and 283; 930 and 284; 930 and 285; 930 and 286; 930 and 287; 930 and 288; 930 and 289; 930 and 290; 930 and 291; 930 and 292; 931 and 270; 931 and 272; 931 and 273; 931 and 274; 931 and 275; 931 and 276; 931 and 277; 931 and 278; 931 and 279; 931 and 280; 931 and 281; 931 and 282; 931 and 283; 931 and 284; 931 and 285; 931 and 286; 931 and 287; 931 and 288; 931 and 289; 931 and 290; 931 and 291; 931 and 292; 932 and 270; 932 and 272; 932 and 273; 932 and 274; 932 and 275; 932 and 276; 932 and 277; 932 and 278; 932 and 279; 932 and 280; 932 and 281; 932 and 282; 932 and 283; 932 and 284; 932 and 285; 932 and 286; 932 and 287; 932 and 288; 932 and 289; 932 and 290; 932 and 291; 932 and 292; 933 and 270; 933 and 272; 933 and 273; 933 and 274; 933 and 275; 933 and 276; 933 and 277; 933 and 278; 933 and 279; 933 and 280; 933 and 281; 933 and 282; 933 and 283; 933 and 284; 933 and 285; 933 and 286; 933 and 287; 933 and 288; 933 and 289; 933 and 290; 933 and 291; 933 and 292; 934 and 270; 934 and 272; 934 and 273; 934 and 274; 934 and 275; 934 and 276; 934 and 277; 934 and 278; 934 and 279; 934 and 280; 934 and 281; 934 and 282; 934 and 283; 934 and 284; 934 and 285; 934 and 286; 934 and 287; 934 and 288; 934 and 289; 934 and 290; 934 and 291; 934 and 292; 935 and 270; 935 and 272; 935 and 273; 935 and 274; 935 and 275; 935 and 276; 935 and 277; 935 and 278; 935 and 279; 935 and 280; 935 and 281; 935 and 282; 935 and 283; 935 and 284; 935 and 285; 935 and 286; 935 and 287; 935 and 288; 935 and 289; 935 and 290; 935 and 291; 935 and 292; 936 and 270; 936 and 272; 936 and 273; 936 and 274; 936 and 275; 936 and 276; 936 and 277; 936 and 278; 936 and 279; 936 and 280; 936 and 281; 936 and 282; 936 and 283; 936 and 284; 936 and 285; 936 and 286; 936 and 287; 936 and 288; 936 and 289; 936 and 290; 936 and 291; 936 and 292; 937 and 270; 937 and 272; 937 and 273; 937 and 274; 937 and 275; 937 and 276; 937 and 277; 937 and 278; 937 and 279; 937 and 280; 937 and 281; 937 and 282; 937 and 283; 937 and 284; 937 and 285; 937 and 286; 937 and 287; 937 and 288; 937 and 289; 937 and 290; 937 and 291; 937 and 292; 938 and 270; 938 and 272; 938 and 273; 938 and 274; 938 and 275; 938 and 276; 938 and 277; 938 and 278; 938 and 279; 938 and 280; 938 and 281; 938 and 282; 938 and 283; 938 and 284; 938 and 285; 938 and 286; 938 and 287; 938 and 288; 938 and 289; 938 and 290; 938 and 291; 938 and 292; 950 and 275; 951 and 275; 952 and 275; 953 and 275; 954 and 275; or 955 and 275;
g. For exon 44 with SluCas9, SEQ ID NOs: 200 and 203; 200 and 204; 202 and 203; 202 and 205; 202 and 206; 202 and 207; 204 and 208; 204 and 205; 204 and 206; 204 and 207; or 204 and 208;
h. For exon 50 with SluCas9, SEQ ID NOs: 231 and 232; 231 and 234; 231 and 236; 231 and 237; 236 and 233; 236 and 235; 236 and 238; 236 and 240; or 236 and 241;
i. For exon 53 with SaCas9, SEQ ID NOs: 86 and 96; 87 and 96; 88 and 97; 89 and 96; 90 and 97; 92 and 77; 92 and 78; 92 and 96; 92 and 99; 93 and 98; 93 and 102; 94 and 100; 95 and 77; 95 and 78; 95 and 99; 96 and 100; 97 and 98; 97 and 102; 98 and 73; or 102 and 73; and
j. For exon 53 with SluCas9, SEQ ID NOs: 278 and 290; 278 and 292; 281 and 291; 283 and 290; 283 and 292; 287 and 291; 272 and 290; 290 and 291; or 272 and 292.

3. A composition comprising: one or more nucleic acid molecules encoding
a. a SaCas9 or SluCas9; and
b. a first guide sequence and a second guide sequence, wherein the first and the second guide sequences are selected from any of the following pairs of guide sequences: SEQ ID NO: 1 and SEQ ID NO: 3; SEQ ID NO: 16 and SEQ ID NO: 17; SEQ ID NO: 16 and SEQ ID NO: 18; SEQ ID NO: 16 and SEQ ID NO: 19; SEQ ID NO: 16 and SEQ ID NO: 20; SEQ ID NO: 16 and SEQ ID NO: 21; SEQ ID NO: 16 and SEQ ID NO: 22; SEQ ID NO: 16 and SEQ ID NO: 23; SEQ ID NO: 16 and SEQ ID NO: 24; SEQ ID NO: 16 and SEQ ID NO: 25; SEQ ID NO: 16 and SEQ ID NO: 26; SEQ ID NO: 17 and SEQ ID NO: 18; SEQ ID NO: 17 and SEQ ID NO: 19; SEQ ID NO: 17 and SEQ ID NO: 20; SEQ ID NO: 17 and SEQ ID NO: 21; SEQ ID NO: 17 and SEQ ID NO: 22; SEQ ID NO: 17 and SEQ ID NO: 23; SEQ ID NO: 17 and SEQ ID NO: 24; SEQ ID NO: 17 and SEQ ID NO: 25; SEQ ID NO: 17 and SEQ ID NO: 26; SEQ ID NO: 18 and SEQ ID NO: 19; SEQ ID NO: 18 and SEQ ID NO: 20; SEQ ID NO: 18 and SEQ ID NO: 21; SEQ ID NO: 18 and SEQ ID NO: 22; SEQ ID NO: 18 and SEQ ID NO: 23; SEQ ID NO: 18 and SEQ ID NO: 24; SEQ ID NO: 18 and SEQ ID NO: 25; SEQ ID NO: 18 and SEQ ID NO: 26; SEQ ID NO: 19 and SEQ ID NO: 20; SEQ ID NO: 19 and SEQ ID NO: 21; SEQ ID NO: 19 and SEQ ID NO: 22; SEQ ID NO: 19 and SEQ ID NO: 23; SEQ ID NO: 19 and SEQ ID NO: 24; SEQ ID NO: 19 and SEQ ID NO: 25; SEQ ID NO: 19 and SEQ ID NO: 26; SEQ ID NO: 20 and SEQ ID NO: 21; SEQ ID NO: 20 and SEQ ID NO: 22; SEQ ID NO: 20 and SEQ ID NO: 23; SEQ ID NO: 20 and SEQ ID NO: 24; SEQ ID NO: 20 and SEQ ID NO: 25; SEQ ID NO: 20 and SEQ ID NO: 26; SEQ ID NO: 21 and SEQ ID NO: 22; SEQ ID NO: 21 and SEQ ID NO: 23; SEQ ID NO: 21 and SEQ ID NO: 24; SEQ ID NO: 21 and SEQ ID NO: 25; SEQ ID NO: 21 and SEQ ID NO: 26; SEQ ID NO: 22 and SEQ ID NO: 23; SEQ ID NO: 22 and SEQ ID NO: 24; SEQ ID NO: 22 and SEQ ID NO: 25; SEQ ID NO: 22 and SEQ ID NO: 26; SEQ ID NO: 23 and SEQ ID NO: 24; SEQ ID NO: 23 and SEQ ID NO: 25; SEQ ID NO: 23 and SEQ ID NO: 26; SEQ ID NO: 24 and SEQ ID NO: 25; SEQ ID NO: 24 and SEQ ID NO: 26; SEQ ID NO: 25 and SEQ ID NO: 26; SEQ ID NO: 110 and SEQ ID NO: 120; SEQ ID NO: 110 and SEQ ID NO: 121; SEQ ID NO: 110 and SEQ ID NO: 122; SEQ ID NO: 110 and SEQ ID NO: 123; SEQ ID NO: 110 and SEQ ID NO: 124; SEQ ID NO: 110 and SEQ ID NO: 125; SEQ ID NO: 111 and SEQ ID NO: 112; SEQ ID NO: 111 and SEQ ID NO: 113; SEQ ID NO: 111 and SEQ ID NO: 114; SEQ ID NO: 111 and SEQ ID NO: 115; SEQ ID NO: 111 and SEQ ID NO: 116; SEQ ID NO: 111 and SEQ ID NO: 117; SEQ ID NO: 111 and SEQ ID NO: 118; SEQ ID NO: 111 and SEQ ID NO: 119; SEQ ID NO: 111 and SEQ ID NO: 120; SEQ ID NO: 111 and SEQ ID NO: 121; SEQ ID NO: 111 and SEQ ID NO: 122; SEQ ID NO: 111 and SEQ ID NO: 123; SEQ ID NO: 111 and SEQ ID NO: 124; SEQ ID NO: 111 and SEQ ID NO: 125; SEQ ID NO: 112 and SEQ ID NO: 113; SEQ ID NO: 112 and SEQ ID NO: 114; SEQ ID NO: 112 and SEQ ID NO: 115; SEQ ID NO: 112 and SEQ ID NO: 116; SEQ ID NO: 112 and SEQ ID NO: 117; SEQ ID NO: 112 and SEQ ID NO: 118; SEQ ID NO: 112 and SEQ ID NO: 119; SEQ ID NO: 112 and SEQ ID NO: 120; SEQ ID NO: 112 and SEQ ID NO: 121; SEQ ID NO: 112 and SEQ ID NO: 122; SEQ ID NO: 112 and SEQ ID NO: 123; SEQ ID NO: 112 and SEQ ID NO: 124; SEQ ID NO: 112 and SEQ ID NO: 125; SEQ ID NO: 113 and SEQ ID NO: 114; SEQ ID NO: 113 and SEQ ID NO: 115; SEQ ID NO: 113 and SEQ ID NO: 116; SEQ ID NO: 113 and SEQ ID NO: 117; SEQ ID NO: 113 and SEQ ID NO: 118; SEQ ID NO: 113 and SEQ ID NO: 119; SEQ ID NO: 113 and SEQ ID NO: 120; SEQ ID NO: 113 and SEQ ID NO: 121; SEQ ID NO: 113 and SEQ ID NO: 122; SEQ ID NO: 113 and SEQ ID NO: 123; SEQ ID NO: 113 and SEQ ID NO: 124; SEQ ID NO: 113 and SEQ ID NO: 125; SEQ ID NO: 114 and SEQ ID NO: 115; SEQ ID NO: 114 and SEQ ID NO: 116; SEQ ID NO: 114 and SEQ ID NO: 117; SEQ ID NO: 114 and SEQ ID NO: 118; SEQ ID NO: 114 and SEQ ID NO: 119; SEQ ID NO: 114 and SEQ ID NO: 120; SEQ ID NO: 114 and SEQ ID NO: 121; SEQ ID NO: 114 and SEQ ID NO: 122; SEQ ID NO: 114 and SEQ ID NO: 123; SEQ ID NO: 114 and SEQ ID NO: 124; SEQ ID NO: 114 and SEQ ID NO: 125; SEQ ID NO: 115 and SEQ ID NO: 116; SEQ ID NO: 115 and SEQ ID NO: 117; SEQ ID NO: 115 and SEQ ID NO: 118; SEQ ID NO: 115 and SEQ ID NO: 119; SEQ ID NO: 115 and SEQ ID NO: 120; SEQ ID NO: 115 and SEQ ID NO: 121; SEQ ID NO: 115 and SEQ ID NO: 122; SEQ ID NO: 115 and SEQ ID NO: 123; SEQ ID NO: 115 and SEQ ID NO: 124; SEQ ID NO: 115 and SEQ ID NO: 125; SEQ ID NO: 116 and SEQ ID NO: 117; SEQ ID NO: 116 and SEQ ID NO: 118; SEQ ID NO: 116 and SEQ ID NO: 119; SEQ ID NO: 116 and SEQ ID NO: 120; SEQ ID NO: 116 and SEQ ID NO: 121; SEQ ID NO: 116 and SEQ ID NO: 122; SEQ ID NO: 116 and SEQ ID NO: 123; SEQ ID NO: 116 and SEQ ID NO: 124; SEQ ID NO: 116 and SEQ ID NO: 125; SEQ ID NO: 117 and SEQ ID NO: 118; SEQ ID NO: 117 and SEQ ID NO: 119; SEQ ID NO: 117 and SEQ ID NO: 120; SEQ ID NO: 117 and SEQ ID NO: 121; SEQ ID NO: 117 and SEQ ID NO: 122; SEQ ID NO: 117 and SEQ ID NO: 123; SEQ ID NO: 117 and SEQ ID NO: 124; SEQ ID NO: 117 and SEQ ID NO: 125; SEQ ID NO: 118 and SEQ ID NO: 119; SEQ ID NO: 118 and SEQ ID NO: 120; SEQ ID NO: 118 and SEQ ID NO: 121; SEQ ID NO: 118 and SEQ ID NO: 122; SEQ ID NO: 118 and SEQ ID NO: 123; SEQ ID NO: 118 and SEQ ID NO: 124; SEQ ID NO: 118 and SEQ ID NO: 125; SEQ ID NO: 119 and SEQ ID NO: 120; SEQ ID NO: 119 and SEQ ID NO: 121; SEQ ID NO: 119 and SEQ ID NO: 122; SEQ ID NO: 119 and SEQ ID NO: 123; SEQ ID NO: 119 and SEQ ID NO: 124; SEQ ID NO: 119 and SEQ ID NO: 125; SEQ ID NO: 120 and SEQ ID NO: 121; SEQ ID NO: 120 and SEQ ID NO: 122; SEQ ID NO: 120 and SEQ ID NO: 123; SEQ ID NO: 120 and SEQ ID NO: 124; SEQ ID NO: 120 and SEQ ID NO: 125; SEQ ID NO: 121 and SEQ ID NO: 122; SEQ ID NO: 121 and SEQ ID NO: 123; SEQ ID NO: 121 and SEQ ID NO: 124; SEQ ID NO: 121 and SEQ ID NO: 125; SEQ ID NO: 122 and SEQ ID NO: 123; SEQ ID NO: 122 and SEQ ID NO: 124; SEQ ID NO: 122 and SEQ ID NO: 125; SEQ ID NO: 123 and SEQ ID NO: 124; SEQ ID NO: 123 and SEQ ID NO: 125; SEQ ID NO: 124 and SEQ ID NO: 125; SEQ ID NO: 148 and SEQ ID NO: 149; SEQ ID NO: 148 and SEQ ID NO: 150; SEQ ID NO: 148 and SEQ ID NO: 151; SEQ ID NO: 148 and SEQ ID NO: 152; SEQ ID NO: 148 and SEQ ID NO: 153; SEQ ID NO: 148 and SEQ ID NO: 154; SEQ ID NO: 148 and SEQ ID NO: 155; SEQ ID NO: 148 and SEQ ID NO: 156; SEQ ID NO: 148 and SEQ ID NO: 157; SEQ ID NO: 148 and SEQ ID NO: 158; SEQ ID NO: 148 and SEQ ID NO: 159; SEQ ID NO: 149 and SEQ ID NO: 150; SEQ ID NO: 149 and SEQ ID NO: 151; SEQ ID NO: 149 and SEQ ID NO: 152; SEQ ID NO: 149 and SEQ ID NO: 153; SEQ ID NO: 149 and SEQ ID NO: 154; SEQ ID NO: 149 and SEQ ID NO: 155; SEQ ID NO: 149 and SEQ ID NO: 156; SEQ ID NO: 149 and SEQ ID NO: 157; SEQ ID NO: 149 and SEQ ID NO: 158; SEQ ID NO: 149 and SEQ ID NO: 159; SEQ ID NO: 150 and SEQ ID NO: 151; SEQ ID NO: 150 and SEQ ID NO: 152; SEQ ID NO: 150 and SEQ ID NO: 153; SEQ ID NO: 150 and SEQ ID NO: 154; SEQ ID NO: 150 and SEQ ID NO: 155; SEQ ID NO: 150 and SEQ ID NO: 156; SEQ ID NO: 150 and SEQ ID NO: 157; SEQ ID NO: 150 and SEQ ID NO: 158; SEQ ID NO: 150 and SEQ ID NO: 159; SEQ ID NO: 151 and SEQ ID NO: 152; SEQ ID NO: 151 and SEQ ID NO: 153; SEQ ID NO: 151 and SEQ ID NO: 154; SEQ ID NO: 151 and SEQ ID NO: 155; SEQ ID NO: 151 and SEQ ID NO: 156; SEQ ID NO: 151 and SEQ ID NO: 157; SEQ ID NO: 151 and SEQ ID NO: 158; SEQ ID NO: 151 and SEQ ID NO: 159; SEQ ID NO: 152 and SEQ ID NO: 153; SEQ ID NO: 152 and SEQ ID NO: 154; SEQ ID NO: 152 and SEQ ID NO: 155; SEQ ID NO: 152 and SEQ ID NO: 156; SEQ ID NO: 152 and SEQ ID NO: 157; SEQ ID NO: 152 and SEQ ID NO: 158; SEQ ID NO: 152 and SEQ ID NO: 159; SEQ ID NO: 153 and SEQ ID NO: 154; SEQ ID NO: 153 and SEQ ID NO: 155; SEQ ID NO: 153 and SEQ ID NO: 156; SEQ ID NO: 153 and SEQ ID NO: 157; SEQ ID NO: 153 and SEQ ID NO: 158; SEQ ID NO: 153 and SEQ ID NO: 159; SEQ ID NO: 154 and SEQ ID NO: 155; SEQ ID NO: 154 and SEQ ID NO: 156; SEQ ID NO: 154 and SEQ ID NO: 157; SEQ ID NO: 154 and SEQ ID NO: 158; SEQ ID NO: 154 and SEQ ID NO: 159; SEQ ID NO: 155 and SEQ ID NO: 156; SEQ ID NO: 155 and SEQ ID NO: 157; SEQ ID NO: 155 and SEQ ID NO: 158; SEQ ID NO: 155 and SEQ ID NO: 159; SEQ ID NO: 156 and SEQ ID NO: 157; SEQ ID NO: 156 and SEQ ID NO: 158; SEQ ID NO: 156 and SEQ ID NO: 159; SEQ ID NO: 157 and SEQ ID NO: 158; SEQ ID NO: 157 and SEQ ID NO: 159; SEQ ID NO: 158 and SEQ ID NO: 159; SEQ ID NO: 71 and SEQ ID NO: 72; SEQ ID NO: 71 and SEQ ID NO: 73; SEQ ID NO: 71 and SEQ ID NO: 74; SEQ ID NO: 71 and SEQ ID NO: 75; SEQ ID NO: 71 and SEQ ID NO: 76; SEQ ID NO: 71 and SEQ ID NO: 77; SEQ ID NO: 71 and SEQ ID NO: 78; SEQ ID NO: 71 and SEQ ID NO: 84; SEQ ID NO: 71 and SEQ ID NO: 85; SEQ ID NO: 71 and SEQ ID NO: 86; SEQ ID NO: 71 and SEQ ID NO: 87; SEQ ID NO: 71 and SEQ ID NO: 88; SEQ ID NO: 71 and SEQ ID NO: 89; SEQ ID NO: 71 and SEQ ID NO: 90; SEQ ID NO: 71 and SEQ ID NO: 91; SEQ ID NO: 71 and SEQ ID NO: 92; SEQ ID NO: 71 and SEQ ID NO: 93; SEQ ID NO: 71 and SEQ ID NO: 94; SEQ ID NO: 71 and SEQ ID NO: 95; SEQ ID NO: 71 and SEQ ID NO: 96; SEQ ID NO: 71 and SEQ ID NO: 97; SEQ ID NO: 71 and SEQ ID NO: 98; SEQ ID NO: 71 and SEQ ID NO: 99; SEQ ID NO: 71 and SEQ ID NO: 100; SEQ ID NO: 71 and SEQ ID NO: 101; SEQ ID NO: 71 and SEQ ID NO: 102; SEQ ID NO: 72 and SEQ ID NO: 73; SEQ ID NO: 72 and SEQ ID NO: 74; SEQ ID NO: 72 and SEQ ID NO: 75; SEQ ID NO: 72 and SEQ ID NO: 76; SEQ ID NO: 72 and SEQ ID NO: 77; SEQ ID NO: 72 and SEQ ID NO: 78; SEQ ID NO: 72 and SEQ ID NO: 84; SEQ ID NO: 72 and SEQ ID NO: 85; SEQ ID NO: 72 and SEQ ID NO: 86; SEQ ID NO: 72 and SEQ ID NO: 87; SEQ ID NO: 72 and SEQ ID NO: 88; SEQ ID NO: 72 and SEQ ID NO: 89; SEQ ID NO: 72 and SEQ ID NO: 90; SEQ ID NO: 72 and SEQ ID NO: 91; SEQ ID NO: 72 and SEQ ID NO: 92; SEQ ID NO: 72 and SEQ ID NO: 93; SEQ ID NO: 72 and SEQ ID NO: 94; SEQ ID NO: 72 and SEQ ID NO: 95; SEQ ID NO: 72 and SEQ ID NO: 96; SEQ ID NO: 72 and SEQ ID NO: 97; SEQ ID NO: 72 and SEQ ID NO: 98; SEQ ID NO: 72 and SEQ ID NO: 99; SEQ ID NO: 72 and SEQ ID NO: 100; SEQ ID NO: 72 and SEQ ID NO: 101; SEQ ID NO: 72 and SEQ ID NO: 102; SEQ ID NO: 73 and SEQ ID NO: 74; SEQ ID NO: 73 and SEQ ID NO: 75; SEQ ID NO: 73 and SEQ ID NO: 76; SEQ ID NO: 73 and SEQ ID NO: 77; SEQ ID NO: 73 and SEQ ID NO: 78; SEQ ID NO: 73 and SEQ ID NO: 84; SEQ ID NO: 73 and SEQ ID NO: 85; SEQ ID NO: 73 and SEQ ID NO: 86; SEQ ID NO: 73 and SEQ ID NO: 87; SEQ ID NO: 73 and SEQ ID NO: 88; SEQ ID NO: 73 and SEQ ID NO: 89; SEQ ID NO: 73 and SEQ ID NO: 90; SEQ ID NO: 73 and SEQ ID NO: 91; SEQ ID NO: 73 and SEQ ID NO: 92; SEQ ID NO: 73 and SEQ ID NO: 93; SEQ ID NO: 73 and SEQ ID NO: 94; SEQ ID NO: 73 and SEQ ID NO: 95; SEQ ID NO: 73 and SEQ ID NO: 96; SEQ ID NO: 73 and SEQ ID NO: 97; SEQ ID NO: 73 and SEQ ID NO: 98; SEQ ID NO: 73 and SEQ ID NO: 99; SEQ ID NO: 73 and SEQ ID NO: 100; SEQ ID NO: 73 and SEQ ID NO: 101; SEQ ID NO: 73 and SEQ ID NO: 102; SEQ ID NO: 74 and SEQ ID NO: 75; SEQ ID NO: 74 and SEQ ID NO: 76; SEQ ID NO: 74 and SEQ ID NO: 77; SEQ ID NO: 74 and SEQ ID NO: 78; SEQ ID NO: 74 and SEQ ID NO: 84; SEQ ID NO: 74 and SEQ ID NO: 85; SEQ ID NO: 74 and SEQ ID NO: 86; SEQ ID NO: 74 and SEQ ID NO: 87; SEQ ID NO: 74 and SEQ ID NO: 88; SEQ ID NO: 74 and SEQ ID NO: 89; SEQ ID NO: 74 and SEQ ID NO: 90; SEQ ID NO: 74 and SEQ ID NO: 91; SEQ ID NO: 74 and SEQ ID NO: 92; SEQ ID NO: 74 and SEQ ID NO: 93; SEQ ID NO: 74 and SEQ ID NO: 94; SEQ ID NO: 74 and SEQ ID NO: 95; SEQ ID NO: 74 and SEQ ID NO: 96; SEQ ID NO: 74 and SEQ ID NO: 97; SEQ ID NO: 74 and SEQ ID NO: 98; SEQ ID NO: 74 and SEQ ID NO: 99; SEQ ID NO: 74 and SEQ ID NO: 100; SEQ ID NO: 74 and SEQ ID NO: 101; SEQ ID NO: 74 and SEQ ID NO: 102; SEQ ID NO: 75 and SEQ ID NO: 76; SEQ ID NO: 75 and SEQ ID NO: 77; SEQ ID NO: 75 and SEQ ID NO: 78; SEQ ID NO: 75 and SEQ ID NO: 84; SEQ ID NO: 75 and SEQ ID NO: 85; SEQ ID NO: 75 and SEQ ID NO: 86; SEQ ID NO: 75 and SEQ ID NO: 87; SEQ ID NO: 75 and SEQ ID NO: 88; SEQ ID NO: 75 and SEQ ID NO: 89; SEQ ID NO: 75 and SEQ ID NO: 90; SEQ ID NO: 75 and SEQ ID NO: 91; SEQ ID NO: 75 and SEQ ID NO: 92; SEQ ID NO: 75 and SEQ ID NO: 93; SEQ ID NO: 75 and SEQ ID NO: 94; SEQ ID NO: 75 and SEQ ID NO: 95; SEQ ID NO: 75 and SEQ ID NO: 96; SEQ ID NO: 75 and SEQ ID NO: 97; SEQ ID NO: 75 and SEQ ID NO: 98; SEQ ID NO: 75 and SEQ ID NO: 99; SEQ ID NO: 75 and SEQ ID NO: 100; SEQ ID NO: 75 and SEQ ID NO: 101; SEQ ID NO: 75 and SEQ ID NO: 102; SEQ ID NO: 76 and SEQ ID NO: 77; SEQ ID NO: 76 and SEQ ID NO: 78; SEQ ID NO: 76 and SEQ ID NO: 84; SEQ ID NO: 76 and SEQ ID NO: 85; SEQ ID NO: 76 and SEQ ID NO: 86; SEQ ID NO: 76 and SEQ ID NO: 87; SEQ ID NO: 76 and SEQ ID NO: 88; SEQ ID NO: 76 and SEQ ID NO: 89; SEQ ID NO: 76 and SEQ ID NO: 90; SEQ ID NO: 76 and SEQ ID NO: 91; SEQ ID NO: 76 and SEQ ID NO: 92; SEQ ID NO: 76 and SEQ ID NO: 93; SEQ ID NO: 76 and SEQ ID NO: 94; SEQ ID NO: 76 and SEQ ID NO: 95; SEQ ID NO: 76 and SEQ ID NO: 96; SEQ ID NO: 76 and SEQ ID NO: 97; SEQ ID NO: 76 and SEQ ID NO: 98; SEQ ID NO: 76 and SEQ ID NO: 99; SEQ ID NO: 76 and SEQ ID NO: 100; SEQ ID NO: 76 and SEQ ID NO: 101; SEQ ID NO: 76 and SEQ ID NO: 102; SEQ ID NO: 77 and SEQ ID NO: 78; SEQ ID NO: 77 and SEQ ID NO: 84; SEQ ID NO: 77 and SEQ ID NO: 85; SEQ ID NO: 77 and SEQ ID NO: 86; SEQ ID NO: 77 and SEQ ID NO: 87; SEQ ID NO: 77 and SEQ ID NO: 88; SEQ ID NO: 77 and SEQ ID NO: 89; SEQ ID NO: 77 and SEQ ID NO: 90; SEQ ID NO: 77 and SEQ ID NO: 91; SEQ ID NO: 77 and SEQ ID NO: 92; SEQ ID NO: 77 and SEQ ID NO: 93; SEQ ID NO: 77 and SEQ ID NO: 94; SEQ ID NO: 77 and SEQ ID NO: 95; SEQ ID NO: 77 and SEQ ID NO: 96; SEQ ID NO: 77 and SEQ ID NO: 97; SEQ ID NO: 77 and SEQ ID NO: 98; SEQ ID NO: 77 and SEQ ID NO: 99; SEQ ID NO: 77 and SEQ ID NO: 100; SEQ ID NO: 77 and SEQ ID NO: 101; SEQ ID NO: 77 and SEQ ID NO: 102; SEQ ID NO: 78 and SEQ ID NO: 84; SEQ ID NO: 78 and SEQ ID NO: 85; SEQ ID NO: 78 and SEQ ID NO: 86; SEQ ID NO: 78 and SEQ ID NO: 87; SEQ ID NO: 78 and SEQ ID NO: 88; SEQ ID NO: 78 and SEQ ID NO: 89; SEQ ID NO: 78 and SEQ ID NO: 90; SEQ ID NO: 78 and SEQ ID NO: 91; SEQ ID NO: 78 and SEQ ID NO: 92; SEQ ID NO: 78 and SEQ ID NO: 93; SEQ ID NO: 78 and SEQ ID NO: 94; SEQ ID NO: 78 and SEQ ID NO: 95; SEQ ID NO: 78 and SEQ ID NO: 96; SEQ ID NO: 78 and SEQ ID NO: 97; SEQ ID NO: 78 and SEQ ID NO: 98; SEQ ID NO: 78 and SEQ ID NO: 99; SEQ ID NO: 78 and SEQ ID NO: 100; SEQ ID NO: 78 and SEQ ID NO: 101; SEQ ID NO: 78 and SEQ ID NO: 102; SEQ ID NO: 84 and SEQ ID NO: 85; SEQ ID NO: 84 and SEQ ID NO: 86; SEQ ID NO: 84 and SEQ ID NO: 87; SEQ ID NO: 84 and SEQ ID NO: 88; SEQ ID NO: 84 and SEQ ID NO: 89; SEQ ID NO: 84 and SEQ ID NO: 90; SEQ ID NO: 84 and SEQ ID NO: 91; SEQ ID NO: 84 and SEQ ID NO: 92; SEQ ID NO: 84 and SEQ ID NO: 93; SEQ ID NO: 84 and SEQ ID NO: 94; SEQ ID NO: 84 and SEQ ID NO: 95; SEQ ID NO: 84 and SEQ ID NO: 96; SEQ ID NO: 84 and SEQ ID NO: 97; SEQ ID NO: 84 and SEQ ID NO: 98; SEQ ID NO: 84 and SEQ ID NO: 99; SEQ ID NO: 84 and SEQ ID NO: 100; SEQ ID NO: 84 and SEQ ID NO: 101; SEQ ID NO: 84 and SEQ ID NO: 102; SEQ ID NO: 85 and SEQ ID NO: 86; SEQ ID NO: 85 and SEQ ID NO: 87; SEQ ID NO: 85 and SEQ ID NO: 88; SEQ ID NO: 85 and SEQ ID NO: 89; SEQ ID NO: 85 and SEQ ID NO: 90; SEQ ID NO: 85 and SEQ ID NO: 91; SEQ ID NO: 85 and SEQ ID NO: 92; SEQ ID NO: 85 and SEQ ID NO: 93; SEQ ID NO: 85 and SEQ ID NO: 94; SEQ ID NO: 85 and SEQ ID NO: 95; SEQ ID NO: 85 and SEQ ID NO: 96; SEQ ID NO: 85 and SEQ ID NO: 97; SEQ ID NO: 85 and SEQ ID NO: 98; SEQ ID NO: 85 and SEQ ID NO: 99; SEQ ID NO: 85 and SEQ ID NO: 100; SEQ ID NO: 85 and SEQ ID NO: 101; SEQ ID NO: 85 and SEQ ID NO: 102; SEQ ID NO: 86 and SEQ ID NO: 87; SEQ ID NO: 86 and SEQ ID NO: 88; SEQ ID NO: 86 and SEQ ID NO: 89; SEQ ID NO: 86 and SEQ ID NO: 90; SEQ ID NO: 86 and SEQ ID NO: 91; SEQ ID NO: 86 and SEQ ID NO: 92; SEQ ID NO: 86 and SEQ ID NO: 93; SEQ ID NO: 86 and SEQ ID NO: 94; SEQ ID NO: 86 and SEQ ID NO: 95; SEQ ID NO: 86 and SEQ ID NO: 96; SEQ ID NO: 86 and SEQ ID NO: 97; SEQ ID NO: 86 and SEQ ID NO: 98; SEQ ID NO: 86 and SEQ ID NO: 99; SEQ ID NO: 86 and SEQ ID NO: 100; SEQ ID NO: 86 and SEQ ID NO: 101; SEQ ID NO: 86 and SEQ ID NO: 102; SEQ ID NO: 87 and SEQ ID NO: 88; SEQ ID NO: 87 and SEQ ID NO: 89; SEQ ID NO: 87 and SEQ ID NO: 90; SEQ ID NO: 87 and SEQ ID NO: 91; SEQ ID NO: 87 and SEQ ID NO: 92; SEQ ID NO: 87 and SEQ ID NO: 93; SEQ ID NO: 87 and SEQ ID NO: 94; SEQ ID NO: 87 and SEQ ID NO: 95; SEQ ID NO: 87 and SEQ ID NO: 96; SEQ ID NO: 87 and SEQ ID NO: 97; SEQ ID NO: 87 and SEQ ID NO: 98; SEQ ID NO: 87 and SEQ ID NO: 99; SEQ ID NO: 87 and SEQ ID NO: 100; SEQ ID NO: 87 and SEQ ID NO: 101; SEQ ID NO: 87 and SEQ ID NO: 102; SEQ ID NO: 88 and SEQ ID NO: 89; SEQ ID NO: 88 and SEQ ID NO: 90; SEQ ID NO: 88 and SEQ ID NO: 91; SEQ ID NO: 88 and SEQ ID NO: 92; SEQ ID NO: 88 and SEQ ID NO: 93; SEQ ID NO: 88 and SEQ ID NO: 94; SEQ ID NO: 88 and SEQ ID NO: 95; SEQ ID NO: 88 and SEQ ID NO: 96; SEQ ID NO: 88 and SEQ ID NO: 97; SEQ ID NO: 88 and SEQ ID NO: 98; SEQ ID NO: 88 and SEQ ID NO: 99; SEQ ID NO: 88 and SEQ ID NO: 100; SEQ ID NO: 88 and SEQ ID NO: 101; SEQ ID NO: 88 and SEQ ID NO: 102; SEQ ID NO: 89 and SEQ ID NO: 90; SEQ ID NO: 89 and SEQ ID NO: 91; SEQ ID NO: 89 and SEQ ID NO: 92; SEQ ID NO: 89 and SEQ ID NO: 93; SEQ ID NO: 89 and SEQ ID NO: 94; SEQ ID NO: 89 and SEQ ID NO: 95; SEQ ID NO: 89 and SEQ ID NO: 96; SEQ ID NO: 89 and SEQ ID NO: 97; SEQ ID NO: 89 and SEQ ID NO: 98; SEQ ID NO: 89 and SEQ ID NO: 99; SEQ ID NO: 89 and SEQ ID NO: 100; SEQ ID NO: 89 and SEQ ID NO: 101; SEQ ID NO: 89 and SEQ ID NO: 102; SEQ ID NO: 90 and SEQ ID NO: 91; SEQ ID NO: 90 and SEQ ID NO: 92; SEQ ID NO: 90 and SEQ ID NO: 93; SEQ ID NO: 90 and SEQ ID NO: 94; SEQ ID NO: 90 and SEQ ID NO: 95; SEQ ID NO: 90 and SEQ ID NO: 96; SEQ ID NO: 90 and SEQ ID NO: 97; SEQ ID NO: 90 and SEQ ID NO: 98; SEQ ID NO: 90 and SEQ ID NO: 99; SEQ ID NO: 90 and SEQ ID NO: 100; SEQ ID NO: 90 and SEQ ID NO: 101; SEQ ID NO: 90 and SEQ ID NO: 102; SEQ ID NO: 91 and SEQ ID NO: 92; SEQ ID NO: 91 and SEQ ID NO: 93; SEQ ID NO: 91 and SEQ ID NO: 94; SEQ ID NO: 91 and SEQ ID NO: 95; SEQ ID NO: 91 and SEQ ID NO: 96; SEQ ID NO: 91 and SEQ ID NO: 97; SEQ ID NO: 91 and SEQ ID NO: 98; SEQ ID NO: 91 and SEQ ID NO: 99; SEQ ID NO: 91 and SEQ ID NO: 100; SEQ ID NO: 91 and SEQ ID NO: 101; SEQ ID NO: 91 and SEQ ID NO: 102; SEQ ID NO: 92 and SEQ ID NO: 93; SEQ ID NO: 92 and SEQ ID NO: 94; SEQ ID NO: 92 and SEQ ID NO: 95; SEQ ID NO: 92 and SEQ ID NO: 96; SEQ ID NO: 92 and SEQ ID NO: 97; SEQ ID NO: 92 and SEQ ID NO: 98; SEQ ID NO: 92 and SEQ ID NO: 99; SEQ ID NO: 92 and SEQ ID NO: 100; SEQ ID NO: 92 and SEQ ID NO: 101; SEQ ID NO: 92 and SEQ ID NO: 102; SEQ ID NO: 93 and SEQ ID NO: 94; SEQ ID NO: 93 and SEQ ID NO: 95; SEQ ID NO: 93 and SEQ ID NO: 96; SEQ ID NO: 93 and SEQ ID NO: 97; SEQ ID NO: 93 and SEQ ID NO: 98; SEQ ID NO: 93 and SEQ ID NO: 99; SEQ ID NO: 93 and SEQ ID NO: 100; SEQ ID NO: 93 and SEQ ID NO: 101; SEQ ID NO: 93 and SEQ ID NO: 102; SEQ ID NO: 94 and SEQ ID NO: 95; SEQ ID NO: 94 and SEQ ID NO: 96; SEQ ID NO: 94 and SEQ ID NO: 97; SEQ ID NO: 94 and SEQ ID NO: 98; SEQ ID NO: 94 and SEQ ID NO: 99; SEQ ID NO: 94 and SEQ ID NO: 100; SEQ ID NO: 94 and SEQ ID NO: 101; SEQ ID NO: 94 and SEQ ID NO: 102; SEQ ID NO: 95 and SEQ ID NO: 96; SEQ ID NO: 95 and SEQ ID NO: 97; SEQ ID NO: 95 and SEQ ID NO: 98; SEQ ID NO: 95 and SEQ ID NO: 99; SEQ ID NO: 95 and SEQ ID NO: 100; SEQ ID NO: 95 and SEQ ID NO: 101; SEQ ID NO: 95 and SEQ ID NO: 102; SEQ ID NO: 96 and SEQ ID NO: 97; SEQ ID NO: 96 and SEQ ID NO: 98; SEQ ID NO: 96 and SEQ ID NO: 99; SEQ ID NO: 96 and SEQ ID NO: 100; SEQ ID NO: 96 and SEQ ID NO: 101; SEQ ID NO: 96 and SEQ ID NO: 102; SEQ ID NO: 97 and SEQ ID NO: 98; SEQ ID NO: 97 and SEQ ID NO: 99; SEQ ID NO: 97 and SEQ ID NO: 100; SEQ ID NO: 97 and SEQ ID NO: 101; SEQ ID NO: 97 and SEQ ID NO: 102; SEQ ID NO: 98 and SEQ ID NO: 99; SEQ ID NO: 98 and SEQ ID NO: 100; SEQ ID NO: 98 and SEQ ID NO: 101; SEQ ID NO: 98 and SEQ ID NO: 102; SEQ ID NO: 99 and SEQ ID NO: 100; SEQ ID NO: 99 and SEQ ID NO: 101; SEQ ID NO: 99 and SEQ ID NO: 102; SEQ ID NO: 100 and SEQ ID NO: 101; SEQ ID NO: 100 and SEQ ID NO: 102; SEQ ID NO: 101 and SEQ ID NO: 102; SEQ ID NO: 200 and SEQ ID NO: 201; SEQ ID NO: 200 and SEQ ID NO: 202; SEQ ID NO: 200 and SEQ ID NO: 203; SEQ ID NO: 200 and SEQ ID NO: 204; SEQ ID NO: 200 and SEQ ID NO: 205; SEQ ID NO: 200 and SEQ ID NO: 206; SEQ ID NO: 200 and SEQ ID NO: 207; SEQ ID NO: 200 and SEQ ID NO: 208; SEQ ID NO: 201 and SEQ ID NO: 202; SEQ ID NO: 201 and SEQ ID NO: 203; SEQ ID NO: 201 and SEQ ID NO: 204; SEQ ID NO: 201 and SEQ ID NO: 205; SEQ ID NO: 201 and SEQ ID NO: 206; SEQ ID NO: 201 and SEQ ID NO: 207; SEQ ID NO: 201 and SEQ ID NO: 208; SEQ ID NO: 202 and SEQ ID NO: 203; SEQ ID NO: 202 and SEQ ID NO: 204; SEQ ID NO: 202 and SEQ ID NO: 205; SEQ ID NO: 202 and SEQ ID NO: 206; SEQ ID NO: 202 and SEQ ID NO: 207; SEQ ID NO: 202 and SEQ ID NO: 208; SEQ ID NO: 203 and SEQ ID NO: 204; SEQ ID NO: 203 and SEQ ID NO: 205; SEQ ID NO: 203 and SEQ ID NO: 206; SEQ ID NO: 203 and SEQ ID NO: 207; SEQ ID NO: 203 and SEQ ID NO: 208; SEQ ID NO: 204 and SEQ ID NO: 205; SEQ ID NO: 204 and SEQ ID NO: 206; SEQ ID NO: 204 and SEQ ID NO: 207; SEQ ID NO: 204 and SEQ ID NO: 208; SEQ ID NO: 205 and SEQ ID NO: 206; SEQ ID NO: 205 and SEQ ID NO: 207; SEQ ID NO: 205 and SEQ ID NO: 208; SEQ ID NO: 206 and SEQ ID NO: 207; SEQ ID NO: 206 and SEQ ID NO: 208; SEQ ID NO: 207 and SEQ ID NO: 208; SEQ ID NO: 231 and SEQ ID NO: 232; SEQ ID NO: 231 and SEQ ID NO: 233; SEQ ID NO: 231 and SEQ ID NO: 234; SEQ ID NO: 231 and SEQ ID NO: 235; SEQ ID NO: 231 and SEQ ID NO: 236; SEQ ID NO: 231 and SEQ ID NO: 237; SEQ ID NO: 231 and SEQ ID NO: 238; SEQ ID NO: 231 and SEQ ID NO: 239; SEQ ID NO: 231 and SEQ ID NO: 240; SEQ ID NO: 231 and SEQ ID NO: 241; SEQ ID NO: 231 and SEQ ID NO: 242; SEQ ID NO: 232 and SEQ ID NO: 233; SEQ ID NO: 232 and SEQ ID NO: 234; SEQ ID NO: 232 and SEQ ID NO: 235; SEQ ID NO: 232 and SEQ ID NO: 236; SEQ ID NO: 232 and SEQ ID NO: 237; SEQ ID NO: 232 and SEQ ID NO: 238; SEQ ID NO: 232 and SEQ ID NO: 239; SEQ ID NO: 232 and SEQ ID NO: 240; SEQ ID NO: 232 and SEQ ID NO: 241; SEQ ID NO: 232 and SEQ ID NO: 242; SEQ ID NO: 233 and SEQ ID NO: 234; SEQ ID NO: 233 and SEQ ID NO: 235; SEQ ID NO: 233 and SEQ ID NO: 236; SEQ ID NO: 233 and SEQ ID NO: 237; SEQ ID NO: 233 and SEQ ID NO: 238; SEQ ID NO: 233 and SEQ ID NO: 239; SEQ ID NO: 233 and SEQ ID NO: 240; SEQ ID NO: 233 and SEQ ID NO: 241; SEQ ID NO: 233 and SEQ ID NO: 242; SEQ ID NO: 234 and SEQ ID NO: 235; SEQ ID NO: 234 and SEQ ID NO: 236; SEQ ID NO: 234 and SEQ ID NO: 237; SEQ ID NO: 234 and SEQ ID NO: 238; SEQ ID NO: 234 and SEQ ID NO: 239; SEQ ID NO: 234 and SEQ ID NO: 240; SEQ ID NO: 234 and SEQ ID NO: 241; SEQ ID NO: 234 and SEQ ID NO: 242; SEQ ID NO: 235 and SEQ ID NO: 236; SEQ ID NO: 235 and SEQ ID NO: 237; SEQ ID NO: 235 and SEQ ID NO: 238; SEQ ID NO: 235 and SEQ ID NO: 239; SEQ ID NO: 235 and SEQ ID NO: 240; SEQ ID NO: 235 and SEQ ID NO: 241; SEQ ID NO: 235 and SEQ ID NO: 242; SEQ ID NO: 236 and SEQ ID NO: 237; SEQ ID NO: 236 and SEQ ID NO: 238; SEQ ID NO: 236 and SEQ ID NO: 239; SEQ ID NO: 236 and SEQ ID NO: 240; SEQ ID NO: 236 and SEQ ID NO: 241; SEQ ID NO: 236 and SEQ ID NO: 242; SEQ ID NO: 237 and SEQ ID NO: 238; SEQ ID NO: 237 and SEQ ID NO: 239; SEQ ID NO: 237 and SEQ ID NO: 240; SEQ ID NO: 237 and SEQ ID NO: 241; SEQ ID NO: 237 and SEQ ID NO: 242; SEQ ID NO: 238 and SEQ ID NO: 239; SEQ ID NO: 238 and SEQ ID NO: 240; SEQ ID NO: 238 and SEQ ID NO: 241; SEQ ID NO: 238 and SEQ ID NO: 242; SEQ ID NO: 239 and SEQ ID NO: 240; SEQ ID NO: 239 and SEQ ID NO: 241; SEQ ID NO: 239 and SEQ ID NO: 242; SEQ ID NO: 240 and SEQ ID NO: 241; SEQ ID NO: 240 and SEQ ID NO: 242; SEQ ID NO: 241 and SEQ ID NO: 242; SEQ ID NO: 270 and SEQ ID NO: 271; SEQ ID NO: 270 and SEQ ID NO: 272; SEQ ID NO: 270 and SEQ ID NO: 273; SEQ ID NO: 270 and SEQ ID NO: 274; SEQ ID NO: 270 and SEQ ID NO: 275; SEQ ID NO: 270 and SEQ ID NO: 276; SEQ ID NO: 270 and SEQ ID NO: 277; SEQ ID NO: 270 and SEQ ID NO: 278; SEQ ID NO: 270 and SEQ ID NO: 279; SEQ ID NO: 270 and SEQ ID NO: 280; SEQ ID NO: 270 and SEQ ID NO: 281; SEQ ID NO: 270 and SEQ ID NO: 282; SEQ ID NO: 270 and SEQ ID NO: 283; SEQ ID NO: 270 and SEQ ID NO: 284; SEQ ID NO: 270 and SEQ ID NO: 285; SEQ ID NO: 270 and SEQ ID NO: 286; SEQ ID NO: 270 and SEQ ID NO: 287; SEQ ID NO: 270 and SEQ ID NO: 288; SEQ ID NO: 270 and SEQ ID NO: 289; SEQ ID NO: 270 and SEQ ID NO: 290; SEQ ID NO: 270 and SEQ ID NO: 291; SEQ ID NO: 270 and SEQ ID NO: 292; SEQ ID NO: 271 and SEQ ID NO: 272; SEQ ID NO: 271 and SEQ ID NO: 273; SEQ ID NO: 271 and SEQ ID NO: 274; SEQ ID NO: 271 and SEQ ID NO: 275; SEQ ID NO: 271 and SEQ ID NO: 276; SEQ ID NO: 271 and SEQ ID NO: 277; SEQ ID NO: 271 and SEQ ID NO: 278; SEQ ID NO: 271 and SEQ ID NO: 279; SEQ ID NO: 271 and SEQ ID NO: 280; SEQ ID NO: 271 and SEQ ID NO: 281; SEQ ID NO: 271 and SEQ ID NO: 282; SEQ ID NO: 271 and SEQ ID NO: 283; SEQ ID NO: 271 and SEQ ID NO: 284; SEQ ID NO: 271 and SEQ ID NO: 285; SEQ ID NO: 271 and SEQ ID NO: 286; SEQ ID NO: 271 and SEQ ID NO: 287; SEQ ID NO: 271 and SEQ ID NO: 288; SEQ ID NO: 271 and SEQ ID NO: 289; SEQ ID NO: 271 and SEQ ID NO: 290; SEQ ID NO: 271 and SEQ ID NO: 291; SEQ ID NO: 271 and SEQ ID NO: 292; SEQ ID NO: 272 and SEQ ID NO: 273; SEQ ID NO: 272 and SEQ ID NO: 274; SEQ ID NO: 272 and SEQ ID NO: 275; SEQ ID NO: 272 and SEQ ID NO: 276; SEQ ID NO: 272 and SEQ ID NO: 277; SEQ ID NO: 272 and SEQ ID NO: 278; SEQ ID NO: 272 and SEQ ID NO: 279; SEQ ID NO: 272 and SEQ ID NO: 280; SEQ ID NO: 272 and SEQ ID NO: 281; SEQ ID NO: 272 and SEQ ID NO: 282; SEQ ID NO: 272 and SEQ ID NO: 283; SEQ ID NO: 272 and SEQ ID NO: 284; SEQ ID NO: 272 and SEQ ID NO: 285; SEQ ID NO: 272 and SEQ ID NO: 286; SEQ ID NO: 272 and SEQ ID NO: 287; SEQ ID NO: 272 and SEQ ID NO: 288; SEQ ID NO: 272 and SEQ ID NO: 289; SEQ ID NO: 272 and SEQ ID NO: 290; SEQ ID NO: 272 and SEQ ID NO: 291; SEQ ID NO: 272 and SEQ ID NO: 292; SEQ ID NO: 273 and SEQ ID NO: 274; SEQ ID NO: 273 and SEQ ID NO: 275; SEQ ID NO: 273 and SEQ ID NO: 276; SEQ ID NO: 273 and SEQ ID NO: 277; SEQ ID NO: 273 and SEQ ID NO: 278; SEQ ID NO: 273 and SEQ ID NO: 279; SEQ ID NO: 273 and SEQ ID NO: 280; SEQ ID NO: 273 and SEQ ID NO: 281; SEQ ID NO: 273 and SEQ ID NO: 282; SEQ ID NO: 273 and SEQ ID NO: 283; SEQ ID NO: 273 and SEQ ID NO: 284; SEQ ID NO: 273 and SEQ ID NO: 285; SEQ ID NO: 273 and SEQ ID NO: 286; SEQ ID NO: 273 and SEQ ID NO: 287; SEQ ID NO: 273 and SEQ ID NO: 288; SEQ ID NO: 273 and SEQ ID NO: 289; SEQ ID NO: 273 and SEQ ID NO: 290; SEQ ID NO: 273 and SEQ ID NO: 291; SEQ ID NO: 273 and SEQ ID NO: 292; SEQ ID NO: 274 and SEQ ID NO: 275; SEQ ID NO: 274 and SEQ ID NO: 276; SEQ ID NO: 274 and SEQ ID NO: 277; SEQ ID NO: 274 and SEQ ID NO: 278; SEQ ID NO: 274 and SEQ ID NO: 279; SEQ ID NO: 274 and SEQ ID NO: 280; SEQ ID NO: 274 and SEQ ID NO: 281; SEQ ID NO: 274 and SEQ ID NO: 282; SEQ ID NO: 274 and SEQ ID NO: 283; SEQ ID NO: 274 and SEQ ID NO: 284; SEQ ID NO: 274 and SEQ ID NO: 285; SEQ ID NO: 274 and SEQ ID NO: 286; SEQ ID NO: 274 and SEQ ID NO: 287; SEQ ID NO: 274 and SEQ ID NO: 288; SEQ ID NO: 274 and SEQ ID NO: 289; SEQ ID NO: 274 and SEQ ID NO: 290; SEQ ID NO: 274 and SEQ ID NO: 291; SEQ ID NO: 274 and SEQ ID NO: 292; SEQ ID NO: 275 and SEQ ID NO: 276; SEQ ID NO: 275 and SEQ ID NO: 277; SEQ ID NO: 275 and SEQ ID NO: 278; SEQ ID NO: 275 and SEQ ID NO: 279; SEQ ID NO: 275 and SEQ ID NO: 280; SEQ ID NO: 275 and SEQ ID NO: 281; SEQ ID NO: 275 and SEQ ID NO: 282; SEQ ID NO: 275 and SEQ ID NO: 283; SEQ ID NO: 275 and SEQ ID NO: 284; SEQ ID NO: 275 and SEQ ID NO: 285; SEQ ID NO: 275 and SEQ ID NO: 286; SEQ ID NO: 275 and SEQ ID NO: 287; SEQ ID NO: 275 and SEQ ID NO: 288; SEQ ID NO: 275 and SEQ ID NO: 289; SEQ ID NO: 275 and SEQ ID NO: 290; SEQ ID NO: 275 and SEQ ID NO: 291; SEQ ID NO: 275 and SEQ ID NO: 292; SEQ ID NO: 276 and SEQ ID NO: 277; SEQ ID NO: 276 and SEQ ID NO: 278; SEQ ID NO: 276 and SEQ ID NO: 279; SEQ ID NO: 276 and SEQ ID NO: 280; SEQ ID NO: 276 and SEQ ID NO: 281; SEQ ID NO: 276 and SEQ ID NO: 282; SEQ ID NO: 276 and SEQ ID NO: 283; SEQ ID NO: 276 and SEQ ID NO: 284; SEQ ID NO: 276 and SEQ ID NO: 285; SEQ ID NO: 276 and SEQ ID NO: 286; SEQ ID NO: 276 and SEQ ID NO: 287; SEQ ID NO: 276 and SEQ ID NO: 288; SEQ ID NO: 276 and SEQ ID NO: 289; SEQ ID NO: 276 and SEQ ID NO: 290; SEQ ID NO: 276 and SEQ ID NO: 291; SEQ ID NO: 276 and SEQ ID NO: 292; SEQ ID NO: 277 and SEQ ID NO: 278; SEQ ID NO: 277 and SEQ ID NO: 279; SEQ ID NO: 277 and SEQ ID NO: 280; SEQ ID NO: 277 and SEQ ID NO: 281; SEQ ID NO: 277 and SEQ ID NO: 282; SEQ ID NO: 277 and SEQ ID NO: 283; SEQ ID NO: 277 and SEQ ID NO: 284; SEQ ID NO: 277 and SEQ ID NO: 285; SEQ ID NO: 277 and SEQ ID NO: 286; SEQ ID NO: 277 and SEQ ID NO: 287; SEQ ID NO: 277 and SEQ ID NO: 288; SEQ ID NO: 277 and SEQ ID NO: 289; SEQ ID NO: 277 and SEQ ID NO: 290; SEQ ID NO: 277 and SEQ ID NO: 291; SEQ ID NO: 277 and SEQ ID NO: 292; SEQ ID NO: 278 and SEQ ID NO: 279; SEQ ID NO: 278 and SEQ ID NO: 280; SEQ ID NO: 278 and SEQ ID NO: 281; SEQ ID NO: 278 and SEQ ID NO: 282; SEQ ID NO: 278 and SEQ ID NO: 283; SEQ ID NO: 278 and SEQ ID NO: 284; SEQ ID NO: 278 and SEQ ID NO: 285; SEQ ID NO: 278 and SEQ ID NO: 286; SEQ ID NO: 278 and SEQ ID NO: 287; SEQ ID NO: 278 and SEQ ID NO: 288; SEQ ID NO: 278 and SEQ ID NO: 289; SEQ ID NO: 278 and SEQ ID NO: 290; SEQ ID NO: 278 and SEQ ID NO: 291; SEQ ID NO: 278 and SEQ ID NO: 292; SEQ ID NO: 279 and SEQ ID NO: 280; SEQ ID NO: 279 and SEQ ID NO: 281; SEQ ID NO: 279 and SEQ ID NO: 282; SEQ ID NO: 279 and SEQ ID NO: 283; SEQ ID NO: 279 and SEQ ID NO: 284; SEQ ID NO: 279 and SEQ ID NO: 285; SEQ ID NO: 279 and SEQ ID NO: 286; SEQ ID NO: 279 and SEQ ID NO: 287; SEQ ID NO: 279 and SEQ ID NO: 288; SEQ ID NO: 279 and SEQ ID NO: 289; SEQ ID NO: 279 and SEQ ID NO: 290; SEQ ID NO: 279 and SEQ ID NO: 291; SEQ ID NO: 279 and SEQ ID NO: 292; SEQ ID NO: 280 and SEQ ID NO: 281; SEQ ID NO: 280 and SEQ ID NO: 282; SEQ ID NO: 280 and SEQ ID NO: 283; SEQ ID NO: 280 and SEQ ID NO: 284; SEQ ID NO: 280 and SEQ ID NO: 285; SEQ ID NO: 280 and SEQ ID NO: 286; SEQ ID NO: 280 and SEQ ID NO: 287; SEQ ID NO: 280 and SEQ ID NO: 288; SEQ ID NO: 280 and SEQ ID NO: 289; SEQ ID NO: 280 and SEQ ID NO: 290; SEQ ID NO: 280 and SEQ ID NO: 291; SEQ ID NO: 280 and SEQ ID NO: 292; SEQ ID NO: 281 and SEQ ID NO: 282; SEQ ID NO: 281 and SEQ ID NO: 283; SEQ ID NO: 281 and SEQ ID NO: 284; SEQ ID NO: 281 and SEQ ID NO: 285; SEQ ID NO: 281 and SEQ ID NO: 286; SEQ ID NO: 281 and SEQ ID NO: 287; SEQ ID NO: 281 and SEQ ID NO: 288; SEQ ID NO: 281 and SEQ ID NO: 289; SEQ ID NO: 281 and SEQ ID NO: 290; SEQ ID NO: 281 and SEQ ID NO: 291; SEQ ID NO: 281 and SEQ ID NO: 292; SEQ ID NO: 282 and SEQ ID NO: 283; SEQ ID NO: 282 and SEQ ID NO: 284; SEQ ID NO: 282 and SEQ ID NO: 285; SEQ ID NO: 282 and SEQ ID NO: 286; SEQ ID NO: 282 and SEQ ID NO: 287; SEQ ID NO: 282 and SEQ ID NO: 288; SEQ ID NO: 282 and SEQ ID NO: 289; SEQ ID NO: 282 and SEQ ID NO: 290; SEQ ID NO: 282 and SEQ ID NO: 291; SEQ ID NO: 282 and SEQ ID NO: 292; SEQ ID NO: 283 and SEQ ID NO: 284; SEQ ID NO: 283 and SEQ ID NO: 285; SEQ ID NO: 283 and SEQ ID NO: 286; SEQ ID NO: 283 and SEQ ID NO: 287; SEQ ID NO: 283 and SEQ ID NO: 288; SEQ ID NO: 283 and SEQ ID NO: 289; SEQ ID NO: 283 and SEQ ID NO: 290; SEQ ID NO: 283 and SEQ ID NO: 291; SEQ ID NO: 283 and SEQ ID NO: 292; SEQ ID NO: 284 and SEQ ID NO: 285; SEQ ID NO: 284 and SEQ ID NO: 286; SEQ ID NO: 284 and SEQ ID NO: 287; SEQ ID NO: 284 and SEQ ID NO: 288; SEQ ID NO: 284 and SEQ ID NO: 289; SEQ ID NO: 284 and SEQ ID NO: 290; SEQ ID NO: 284 and SEQ ID NO: 291; SEQ ID NO: 284 and SEQ ID NO: 292; SEQ ID NO: 285 and SEQ ID NO: 286; SEQ ID NO: 285 and SEQ ID NO: 287; SEQ ID NO: 285 and SEQ ID NO: 288; SEQ ID NO: 285 and SEQ ID NO: 289; SEQ ID NO: 285 and SEQ ID NO: 290; SEQ ID NO: 285 and SEQ ID NO: 291; SEQ ID NO: 285 and SEQ ID NO: 292; SEQ ID NO: 286 and SEQ ID NO: 287; SEQ ID NO: 286 and SEQ ID NO: 288; SEQ ID NO: 286 and SEQ ID NO: 289; SEQ ID NO: 286 and SEQ ID NO: 290; SEQ ID NO: 286 and SEQ ID NO: 291; SEQ ID NO: 286 and SEQ ID NO: 292; SEQ ID NO: 287 and SEQ ID NO: 288; SEQ ID NO: 287 and SEQ ID NO: 289; SEQ ID NO: 287 and SEQ ID NO: 290; SEQ ID NO: 287 and SEQ ID NO: 291; SEQ ID NO: 287 and SEQ ID NO: 292; SEQ ID NO: 288 and SEQ ID NO: 289; SEQ ID NO: 288 and SEQ ID NO: 290; SEQ ID NO: 288 and SEQ ID NO: 291; SEQ ID NO: 288 and SEQ ID NO: 292; SEQ ID NO: 289 and SEQ ID NO: 290; SEQ ID NO: 289 and SEQ ID NO: 291; SEQ ID NO: 289 and SEQ ID NO: 292; SEQ ID NO: 290 and SEQ ID NO: 291; SEQ ID NO: 290 and SEQ ID NO: 292; SEQ ID NO: 291 and SEQ ID NO: 292; SEQ ID NO: 270 and SEQ ID NO: 924; SEQ ID NO: 270 and SEQ ID NO: 925; SEQ ID NO: 270 and SEQ ID NO: 926; SEQ ID NO: 270 and SEQ ID NO: 927; SEQ ID NO: 270 and SEQ ID NO: 928; SEQ ID NO: 270 and SEQ ID NO: 929; SEQ ID NO: 270 and SEQ ID NO: 930; SEQ ID NO: 270 and SEQ ID NO: 931; SEQ ID NO: 270 and SEQ ID NO: 932; SEQ ID NO: 270 and SEQ ID NO: 933; SEQ ID NO: 270 and SEQ ID NO: 934; SEQ ID NO: 270 and SEQ ID NO: 935; SEQ ID NO: 270 and SEQ ID NO: 936; SEQ ID NO: 270 and SEQ ID NO: 937; SEQ ID NO: 270 and SEQ ID NO: 938; SEQ ID NO: 272 and SEQ ID NO: 924; SEQ ID NO: 272 and SEQ ID NO: 925; SEQ ID NO: 272 and SEQ ID NO: 926; SEQ ID NO: 272 and SEQ ID NO: 927; SEQ ID NO: 272 and SEQ ID NO: 928; SEQ ID NO: 272 and SEQ ID NO: 929; SEQ ID NO: 272 and SEQ ID NO: 930; SEQ ID NO: 272 and SEQ ID NO: 931; SEQ ID NO: 272 and SEQ ID NO: 932; SEQ ID NO: 272 and SEQ ID NO: 933; SEQ ID NO: 272 and SEQ ID NO: 934; SEQ ID NO: 272 and SEQ ID NO: 935; SEQ ID NO: 272 and SEQ ID NO: 936; SEQ ID NO: 272 and SEQ ID NO: 937; SEQ ID NO: 272 and SEQ ID NO: 938; SEQ ID NO: 273 and SEQ ID NO: 924; SEQ ID NO: 273 and SEQ ID NO: 925; SEQ ID NO: 273 and SEQ ID NO: 926; SEQ ID NO: 273 and SEQ ID NO: 927; SEQ ID NO: 273 and SEQ ID NO: 928; SEQ ID NO: 273 and SEQ ID NO: 929; SEQ ID NO: 273 and SEQ ID NO: 930; SEQ ID NO: 273 and SEQ ID NO: 931; SEQ ID NO: 273 and SEQ ID NO: 932; SEQ ID NO: 273 and SEQ ID NO: 933; SEQ ID NO: 273 and SEQ ID NO: 934; SEQ ID NO: 273 and SEQ ID NO: 935; SEQ ID NO: 273 and SEQ ID NO: 936; SEQ ID NO: 273 and SEQ ID NO: 937; SEQ ID NO: 273 and SEQ ID NO: 938; SEQ ID NO: 274 and SEQ ID NO: 924; SEQ ID NO: 274 and SEQ ID NO: 925; SEQ ID NO: 274 and SEQ ID NO: 926; SEQ ID NO: 274 and SEQ ID NO: 927; SEQ ID NO: 274 and SEQ ID NO: 928; SEQ ID NO: 274 and SEQ ID NO: 929; SEQ ID NO: 274 and SEQ ID NO: 930; SEQ ID NO: 274 and SEQ ID NO: 931; SEQ ID NO: 274 and SEQ ID NO: 932; SEQ ID NO: 274 and SEQ ID NO: 933; SEQ ID NO: 274 and SEQ ID NO: 934; SEQ ID NO: 274 and SEQ ID NO: 935; SEQ ID NO: 274 and SEQ ID NO: 936; SEQ ID NO: 274 and SEQ ID NO: 937; SEQ ID NO: 274 and SEQ ID NO: 938; SEQ ID NO: 275 and SEQ ID NO: 924; SEQ ID NO: 275 and SEQ ID NO: 925; SEQ ID NO: 275 and SEQ ID NO: 926; SEQ ID NO: 275 and SEQ ID NO: 927; SEQ ID NO: 275 and SEQ ID NO: 928; SEQ ID NO: 275 and SEQ ID NO: 929; SEQ ID NO: 275 and SEQ ID NO: 930; SEQ ID NO: 275 and SEQ ID NO: 931; SEQ ID NO: 275 and SEQ ID NO: 932; SEQ ID NO: 275 and SEQ ID NO: 933; SEQ ID NO: 275 and SEQ ID NO: 934; SEQ ID NO: 275 and SEQ ID NO: 935; SEQ ID NO: 275 and SEQ ID NO: 936; SEQ ID NO: 275 and SEQ ID NO: 937; SEQ ID NO: 275 and SEQ ID NO: 938; SEQ ID NO: 276 and SEQ ID NO: 924; SEQ ID NO: 276 and SEQ ID NO: 925; SEQ ID NO: 276 and SEQ ID NO: 926; SEQ ID NO: 276 and SEQ ID NO: 927; SEQ ID NO: 276 and SEQ ID NO: 928; SEQ ID NO: 276 and SEQ ID NO: 929; SEQ ID NO: 276 and SEQ ID NO: 930; SEQ ID NO: 276 and SEQ ID NO: 931; SEQ ID NO: 276 and SEQ ID NO: 932; SEQ ID NO: 276 and SEQ ID NO: 933; SEQ ID NO: 276 and SEQ ID NO: 934; SEQ ID NO: 276 and SEQ ID NO: 935; SEQ ID NO: 276 and SEQ ID NO: 936; SEQ ID NO: 276 and SEQ ID NO: 937; SEQ ID NO: 276 and SEQ ID NO: 938; SEQ ID NO: 277 and SEQ ID NO: 924; SEQ ID NO: 277 and SEQ ID NO: 925; SEQ ID NO: 277 and SEQ ID NO: 926; SEQ ID NO: 277 and SEQ ID NO: 927; SEQ ID NO: 277 and SEQ ID NO: 928; SEQ ID NO: 277 and SEQ ID NO: 929; SEQ ID NO: 277 and SEQ ID NO: 930; SEQ ID NO: 277 and SEQ ID NO: 931; SEQ ID NO: 277 and SEQ ID NO: 932; SEQ ID NO: 277 and SEQ ID NO: 933; SEQ ID NO: 277 and SEQ ID NO: 934; SEQ ID NO: 277 and SEQ ID NO: 935; SEQ ID NO: 277 and SEQ ID NO: 936; SEQ ID NO: 277 and SEQ ID NO: 937; SEQ ID NO: 277 and SEQ ID NO: 938; SEQ ID NO: 278 and SEQ ID NO: 924; SEQ ID NO: 278 and SEQ ID NO: 925; SEQ ID NO: 278 and SEQ ID NO: 926; SEQ ID NO: 278 and SEQ ID NO: 927; SEQ ID NO: 278 and SEQ ID NO: 928; SEQ ID NO: 278 and SEQ ID NO: 929; SEQ ID NO: 278 and SEQ ID NO: 930; SEQ ID NO: 278 and SEQ ID NO: 931; SEQ ID NO: 278 and SEQ ID NO: 932; SEQ ID NO: 278 and SEQ ID NO: 933; SEQ ID NO: 278 and SEQ ID NO: 934; SEQ ID NO: 278 and SEQ ID NO: 935; SEQ ID NO: 278 and SEQ ID NO: 936; SEQ ID NO: 278 and SEQ ID NO: 937; SEQ ID NO: 278 and SEQ ID NO: 938; SEQ ID NO: 279 and SEQ ID NO: 924; SEQ ID NO: 279 and SEQ ID NO: 925; SEQ ID NO: 279 and SEQ ID NO: 926; SEQ ID NO: 279 and SEQ ID NO: 927; SEQ ID NO: 279 and SEQ ID NO: 928; SEQ ID NO: 279 and SEQ ID NO: 929; SEQ ID NO: 279 and SEQ ID NO: 930; SEQ ID NO: 279 and SEQ ID NO: 931; SEQ ID NO: 279 and SEQ ID NO: 932; SEQ ID NO: 279 and SEQ ID NO: 933; SEQ ID NO: 279 and SEQ ID NO: 934; SEQ ID NO: 279 and SEQ ID NO: 935; SEQ ID NO: 279 and SEQ ID NO: 936; SEQ ID NO: 279 and SEQ ID NO: 937; SEQ ID NO: 279 and SEQ ID NO: 938; SEQ ID NO: 280 and SEQ ID NO: 924; SEQ ID NO: 280 and SEQ ID NO: 925; SEQ ID NO: 280 and SEQ ID NO: 926; SEQ ID NO: 280 and SEQ ID NO: 927; SEQ ID NO: 280 and SEQ ID NO: 928; SEQ ID NO: 280 and SEQ ID NO: 929; SEQ ID NO: 280 and SEQ ID NO: 930; SEQ ID NO: 280 and SEQ ID NO: 931; SEQ ID NO: 280 and SEQ ID NO: 932; SEQ ID NO: 280 and SEQ ID NO: 933; SEQ ID NO: 280 and SEQ ID NO: 934; SEQ ID NO: 280 and SEQ ID NO: 935; SEQ ID NO: 280 and SEQ ID NO: 936; SEQ ID NO: 280 and SEQ ID NO: 937; SEQ ID NO: 280 and SEQ ID NO: 938; SEQ ID NO: 281 and SEQ ID NO: 924; SEQ ID NO: 281 and SEQ ID NO: 925; SEQ ID NO: 281 and SEQ ID NO: 926; SEQ ID NO: 281 and SEQ ID NO: 927; SEQ ID NO: 281 and SEQ ID NO: 928; SEQ ID NO: 281 and SEQ ID NO: 929; SEQ ID NO: 281 and SEQ ID NO: 930; SEQ ID NO: 281 and SEQ ID NO: 931; SEQ ID NO: 281 and SEQ ID NO: 932; SEQ ID NO: 281 and SEQ ID NO: 933; SEQ ID NO: 281 and SEQ ID NO: 934; SEQ ID NO: 281 and SEQ ID NO: 935; SEQ ID NO: 281 and SEQ ID NO: 936; SEQ ID NO: 281 and SEQ ID NO: 937; SEQ ID NO: 281 and SEQ ID NO: 938; SEQ ID NO: 282 and SEQ ID NO: 924; SEQ ID NO: 282 and SEQ ID NO: 925; SEQ ID NO: 282 and SEQ ID NO: 926; SEQ ID NO: 282 and SEQ ID NO: 927; SEQ ID NO: 282 and SEQ ID NO: 928; SEQ ID NO: 282 and SEQ ID NO: 929; SEQ ID NO: 282 and SEQ ID NO: 930; SEQ ID NO: 282 and SEQ ID NO: 931; SEQ ID NO: 282 and SEQ ID NO: 932; SEQ ID NO: 282 and SEQ ID NO: 933; SEQ ID NO: 282 and SEQ ID NO: 934; SEQ ID NO: 282 and SEQ ID NO: 935; SEQ ID NO: 282 and SEQ ID NO: 936; SEQ ID NO: 282 and SEQ ID NO: 937; SEQ ID NO: 282 and SEQ ID NO: 938; SEQ ID NO: 283 and SEQ ID NO: 924; SEQ ID NO: 283 and SEQ ID NO: 925; SEQ ID NO: 283 and SEQ ID NO: 926; SEQ ID NO: 283 and SEQ ID NO: 927; SEQ ID NO: 283 and SEQ ID NO: 928; SEQ ID NO: 283 and SEQ ID NO: 929; SEQ ID NO: 283 and SEQ ID NO: 930; SEQ ID NO: 283 and SEQ ID NO: 931; SEQ ID NO: 283 and SEQ ID NO: 932; SEQ ID NO: 283 and SEQ ID NO: 933; SEQ ID NO: 283 and SEQ ID NO: 934; SEQ ID NO: 283 and SEQ ID NO: 935; SEQ ID NO: 283 and SEQ ID NO: 936; SEQ ID NO: 283 and SEQ ID NO: 937; SEQ ID NO: 283 and SEQ ID NO: 938; SEQ ID NO: 284 and SEQ ID NO: 924; SEQ ID NO: 284 and SEQ ID NO: 925; SEQ ID NO: 284 and SEQ ID NO: 926; SEQ ID NO: 284 and SEQ ID NO: 927; SEQ ID NO: 284 and SEQ ID NO: 928; SEQ ID NO: 284 and SEQ ID NO: 929; SEQ ID NO: 284 and SEQ ID NO: 930; SEQ ID NO: 284 and SEQ ID NO: 931; SEQ ID NO: 284 and SEQ ID NO: 932; SEQ ID NO: 284 and SEQ ID NO: 933; SEQ ID NO: 284 and SEQ ID NO: 934; SEQ ID NO: 284 and SEQ ID NO: 935; SEQ ID NO: 284 and SEQ ID NO: 936; SEQ ID NO: 284 and SEQ ID NO: 937; SEQ ID NO: 284 and SEQ ID NO: 938; SEQ ID NO: 285 and SEQ ID NO: 924; SEQ ID NO: 285 and SEQ ID NO: 925; SEQ ID NO: 285 and SEQ ID NO: 926; SEQ ID NO: 285 and SEQ ID NO: 927; SEQ ID NO: 285 and SEQ ID NO: 928; SEQ ID NO: 285 and SEQ ID NO: 929; SEQ ID NO: 285 and SEQ ID NO: 930; SEQ ID NO: 285 and SEQ ID NO: 931; SEQ ID NO: 285 and SEQ ID NO: 932; SEQ ID NO: 285 and SEQ ID NO: 933; SEQ ID NO: 285 and SEQ ID NO: 934; SEQ ID NO: 285 and SEQ ID NO: 935; SEQ ID NO: 285 and SEQ ID NO: 936; SEQ ID NO: 285 and SEQ ID NO: 937; SEQ ID NO: 285 and SEQ ID NO: 938; SEQ ID NO: 286 and SEQ ID NO: 924; SEQ ID NO: 286 and SEQ ID NO: 925; SEQ ID NO: 286 and SEQ ID NO: 926; SEQ ID NO: 286 and SEQ ID NO: 927; SEQ ID NO: 286 and SEQ ID NO: 928; SEQ ID NO: 286 and SEQ ID NO: 929; SEQ ID NO: 286 and SEQ ID NO: 930; SEQ ID NO: 286 and SEQ ID NO: 931; SEQ ID NO: 286 and SEQ ID NO: 932; SEQ ID NO: 286 and SEQ ID NO: 933; SEQ ID NO: 286 and SEQ ID NO: 934; SEQ ID NO: 286 and SEQ ID NO: 935; SEQ ID NO: 286 and SEQ ID NO: 936; SEQ ID NO: 286 and SEQ ID NO: 937; SEQ ID NO: 286 and SEQ ID NO: 938; SEQ ID NO: 287 and SEQ ID NO: 924; SEQ ID NO: 287 and SEQ ID NO: 925; SEQ ID NO: 287 and SEQ ID NO: 926; SEQ ID NO: 287 and SEQ ID NO: 927; SEQ ID NO: 287 and SEQ ID NO: 928; SEQ ID NO: 287 and SEQ ID NO: 929; SEQ ID NO: 287 and SEQ ID NO: 930; SEQ ID NO: 287 and SEQ ID NO: 931; SEQ ID NO: 287 and SEQ ID NO: 932; SEQ ID NO: 287 and SEQ ID NO: 933; SEQ ID NO: 287 and SEQ ID NO: 934; SEQ ID NO: 287 and SEQ ID NO: 935; SEQ ID NO: 287 and SEQ ID NO: 936; SEQ ID NO: 287 and SEQ ID NO: 937; SEQ ID NO: 287 and SEQ ID NO: 938; SEQ ID NO: 288 and SEQ ID NO: 924; SEQ ID NO: 288 and SEQ ID NO: 925; SEQ ID NO: 288 and SEQ ID NO: 926; SEQ ID NO: 288 and SEQ ID NO: 927; SEQ ID NO: 288 and SEQ ID NO: 928; SEQ ID NO: 288 and SEQ ID NO: 929; SEQ ID NO: 288 and SEQ ID NO: 930; SEQ ID NO: 288 and SEQ ID NO: 931; SEQ ID NO: 288 and SEQ ID NO: 932; SEQ ID NO: 288 and SEQ ID NO: 933; SEQ ID NO: 288 and SEQ ID NO: 934; SEQ ID NO: 288 and SEQ ID NO: 935; SEQ ID NO: 288 and SEQ ID NO: 936; SEQ ID NO: 288 and SEQ ID NO: 937; SEQ ID NO: 288 and SEQ ID NO: 938; SEQ ID NO: 289 and SEQ ID NO: 924; SEQ ID NO: 289 and SEQ ID NO: 925; SEQ ID NO: 289 and SEQ ID NO: 926; SEQ ID NO: 289 and SEQ ID NO: 927; SEQ ID NO: 289 and SEQ ID NO: 928; SEQ ID NO: 289 and SEQ ID NO: 929; SEQ ID NO: 289 and SEQ ID NO: 930; SEQ ID NO: 289 and SEQ ID NO: 931; SEQ ID NO: 289 and SEQ ID NO: 932; SEQ ID NO: 289 and SEQ ID NO: 933; SEQ ID NO: 289 and SEQ ID NO: 934; SEQ ID NO: 289 and SEQ ID NO: 935; SEQ ID NO: 289 and SEQ ID NO: 936; SEQ ID NO: 289 and SEQ ID NO: 937; SEQ ID NO: 289 and SEQ ID NO: 938; SEQ ID NO: 290 and SEQ ID NO: 924; SEQ ID NO: 290 and SEQ ID NO: 925; SEQ ID NO: 290 and SEQ ID NO: 926; SEQ ID NO: 290 and SEQ ID NO: 927; SEQ ID NO: 290 and SEQ ID NO: 928; SEQ ID NO: 290 and SEQ ID NO: 929; SEQ ID NO: 290 and SEQ ID NO: 930; SEQ ID NO: 290 and SEQ ID NO: 931; SEQ ID NO: 290 and SEQ ID NO: 932; SEQ ID NO: 290 and SEQ ID NO: 933; SEQ ID NO: 290 and SEQ ID NO: 934; SEQ ID NO: 290 and SEQ ID NO: 935; SEQ ID NO: 290 and SEQ ID NO: 936; SEQ ID NO: 290 and SEQ ID NO: 937; SEQ ID NO: 290 and SEQ ID NO: 938; SEQ ID NO: 291 and SEQ ID NO: 924; SEQ ID NO: 291 and SEQ ID NO: 925; SEQ ID NO: 291 and SEQ ID NO: 926; SEQ ID NO: 291 and SEQ ID NO: 927; SEQ ID NO: 291 and SEQ ID NO: 928; SEQ ID NO: 291 and SEQ ID NO: 929; SEQ ID NO: 291 and SEQ ID NO: 930; SEQ ID NO: 291 and SEQ ID NO: 931; SEQ ID NO: 291 and SEQ ID NO: 932; SEQ ID NO: 291 and SEQ ID NO: 933; SEQ ID NO: 291 and SEQ ID NO: 934; SEQ ID NO: 291 and SEQ ID NO: 935; SEQ ID NO: 291 and SEQ ID NO: 936; SEQ ID NO: 291 and SEQ ID NO: 937; SEQ ID NO: 291 and SEQ ID NO: 938; SEQ ID NO: 292 and SEQ ID NO: 924; SEQ ID NO: 292 and SEQ ID NO: 925; SEQ ID NO: 292 and SEQ ID NO: 926; SEQ ID NO: 292 and SEQ ID NO: 927; SEQ ID NO: 292 and SEQ ID NO: 928; SEQ ID NO: 292 and SEQ ID NO: 929; SEQ ID NO: 292 and SEQ ID NO: 930; SEQ ID NO: 292 and SEQ ID NO: 931; SEQ ID NO: 292 and SEQ ID NO: 932; SEQ ID NO: 292 and SEQ ID NO: 933; SEQ ID NO: 292 and SEQ ID NO: 934; SEQ ID NO: 292 and SEQ ID NO: 935; SEQ ID NO: 292 and SEQ ID NO: 936; SEQ ID NO: 292 and SEQ ID NO: 937; SEQ ID NO: 292 and SEQ ID NO: 938; SEQ ID NO: 950 and SEQ ID NO: 275; SEQ ID NO: 951 and SEQ ID NO: 275; SEQ ID NO: 952 and SEQ ID NO: 275; SEQ ID NO: 953 and SEQ ID NO: 275; SEQ ID NO: 954 and SEQ ID NO: 275; or SEQ ID NO: 955 and SEQ ID NO: 275.

4. (canceled)

5. The composition of claim 1, comprising a pair of guide RNAs, wherein the pair of guide RNAs is capable of excising a portion of the DMD gene; wherein the portion of the DMD gene is between 5-250 nucleotides in length.

6.-12. (canceled)

13. A composition comprising a first and a second nucleic acid molecule, wherein the first nucleic acid molecule encodes a sRGN endonuclease (e.g., sRGN3.1, sRGN3.3, or sRGN4) and optionally a first or a first and second guide RNA, and the second nucleic acid molecule comprises a first or a first and second guide RNA, wherein the first guide RNA comprises a first sequence and the second guide RNAs comprises a second sequence from any one the following pairs of first and second sequences: SEQ ID NOs: 200 and 201; 200 and 202; 200 and 203; 200 and 204; 200 and 205; 200 and 206; 200 and 207; 200 and 208; 201 and 202; 201 and 203; 201 and 204; 201 and 205; 201 and 206; 201 and 207; 201 and 208; 202 and 203; 202 and 204; 202 and 205; 202 and 206; 202 and 207; 202 and 208; 203 and 204; 203 and 205; 203 and 206; 203 and 207; 203 and 208; 204 and 205; 204 and 206; 204 and 207; 204 and 208; 205 and 206; 205 and 207; 205 and 208; 206 and 207; 206 and 208; 207 and 208; 231 and 232; 231 and 233; 231 and 234; 231 and 235; 231 and 236; 231 and 237; 231 and 238; 231 and 239; 231 and 240; 231 and 241; 231 and 242; 232 and 233; 232 and 234; 232 and 235; 232 and 236; 232 and 237; 232 and 238; 232 and 239; 232 and 240; 232 and 241; 232 and 242; 233 and 234; 233 and 235; 233 and 236; 233 and 237; 233 and 238; 233 and 239; 233 and 240; 233 and 241; 233 and 242; 234 and 235; 234 and 236; 234 and 237; 234 and 238; 234 and 239; 234 and 240; 234 and 241; 234 and 242; 235 and 236; 235 and 237; 235 and 238; 235 and 239; 235 and 240; 235 and 241; 235 and 242; 236 and 237; 236 and 238; 236 and 239; 236 and 240; 236 and 241; 236 and 242; 237 and 238; 237 and 239; 237 and 240; 237 and 241; 237 and 242; 238 and 239; 238 and 240; 238 and 241; 238 and 242; 239 and 240; 239 and 241; 239 and 242; 240 and 241; 240 and 242; 241 and 242; 270 and 271; 270 and 272; 270 and 273; 270 and 274; 270 and 275; 270 and 276; 270 and 277; 270 and 278; 270 and 279; 270 and 280; 270 and 281; 270 and 282; 270 and 283; 270 and 284; 270 and 285; 270 and 286; 270 and 287; 270 and 288; 270 and 289; 270 and 290; 270 and 291; 270 and 292; 271 and 272; 271 and 273; 271 and 274; 271 and 275; 271 and 276; 271 and 277; 271 and 278; 271 and 279; 271 and 280; 271 and 281; 271 and 282; 271 and 283; 271 and 284; 271 and 285; 271 and 286; 271 and 287; 271 and 288; 271 and 289; 271 and 290; 271 and 291; 271 and 292; 272 and 273; 272 and 274; 272 and 275; 272 and 276; 272 and 277; 272 and 278; 272 and 279; 272 and 280; 272 and 281; 272 and 282; 272 and 283; 272 and 284; 272 and 285; 272 and 286; 272 and 287; 272 and 288; 272 and 289; 272 and 290; 272 and 291; 272 and 292; 273 and 274; 273 and 275; 273 and 276; 273 and 277; 273 and 278; 273 and 279; 273 and 280; 273 and 281; 273 and 282; 273 and 283; 273 and 284; 273 and 285; 273 and 286; 273 and 287; 273 and 288; 273 and 289; 273 and 290; 273 and 291; 273 and 292; 274 and 275; 274 and 276; 274 and 277; 274 and 278; 274 and 279; 274 and 280; 274 and 281; 274 and 282; 274 and 283; 274 and 284; 274 and 285; 274 and 286; 274 and 287; 274 and 288; 274 and 289; 274 and 290; 274 and 291; 274 and 292; 275 and 276; 275 and 277; 275 and 278; 275 and 279; 275 and 280; 275 and 281; 275 and 282; 275 and 283; 275 and 284; 275 and 285; 275 and 286; 275 and 287; 275 and 288; 275 and 289; 275 and 290; 275 and 291; 275 and 292; 276 and 277; 276 and 278; 276 and 279; 276 and 280; 276 and 281; 276 and 282; 276 and 283; 276 and 284; 276 and 285; 276 and 286; 276 and 287; 276 and 288; 276 and 289; 276 and 290; 276 and 291; 276 and 292; 277 and 278; 277 and 279; 277 and 280; 277 and 281; 277 and 282; 277 and 283; 277 and 284; 277 and 285; 277 and 286; 277 and 287; 277 and 288; 277 and 289; 277 and 290; 277 and 291; 277 and 292; 278 and 279; 278 and 280; 278 and 281; 278 and 282; 278 and 283; 278 and 284; 278 and 285; 278 and 286; 278 and 287; 278 and 288; 278 and 289; 278 and 290; 278 and 291; 278 and 292; 279 and 280; 279 and 281; 279 and 282; 279 and 283; 279 and 284; 279 and 285; 279 and 286; 279 and 287; 279 and 288; 279 and 289; 279 and 290; 279 and 291; 279 and 292; 280 and 281; 280 and 282; 280 and 283; 280 and 284; 280 and 285; 280 and 286; 280 and 287; 280 and 288; 280 and 289; 280 and 290; 280 and 291; 280 and 292; 281 and 282; 281 and 283; 281 and 284; 281 and 285; 281 and 286; 281 and 287; 281 and 288; 281 and 289; 281 and 290; 281 and 291; 281 and 292; 282 and 283; 282 and 284; 282 and 285; 282 and 286; 282 and 287; 282 and 288; 282 and 289; 282 and 290; 282 and 291; 282 and 292; 283 and 284; 283 and 285; 283 and 286; 283 and 287; 283 and 288; 283 and 289; 283 and 290; 283 and 291; 283 and 292; 284 and 285; 284 and 286; 284 and 287; 284 and 288; 284 and 289; 284 and 290; 284 and 291; 284 and 292; 285 and 286; 285 and 287; 285 and 288; 285 and 289; 285 and 290; 285 and 291; 285 and 292; 286 and 287; 286 and 288; 286 and 289; 286 and 290; 286 and 291; 286 and 292; 287 and 288; 287 and 289; 287 and 290; 287 and 291; 287 and 292; 288 and 289; 288 and 290; 288 and 291; 288 and 292; 289 and 290; 289 and 291; 289 and 292; 290 and 291; 290 and 292; 291 and 292; 924 and 270; 924 and 272; 924 and 273; 924 and 274; 924 and 275; 924 and 276; 924 and 277; 924 and 278; 924 and 279; 924 and 280; 924 and 281; 924 and 282; 924 and 283; 924 and 284; 924 and 285; 924 and 286; 924 and 287; 924 and 288; 924 and 289; 924 and 290; 924 and 291; 924 and 292; 925 and 270; 925 and 272; 925 and 273; 925 and 274; 925 and 275; 925 and 276; 925 and 277; 925 and 278; 925 and 279; 925 and 280; 925 and 281; 925 and 282; 925 and 283; 925 and 284; 925 and 285; 925 and 286; 925 and 287; 925 and 288; 925 and 289; 925 and 290; 925 and 291; 925 and 292; 926 and 270; 926 and 272; 926 and 273; 926 and 274; 926 and 275; 926 and 276; 926 and 277; 926 and 278; 926 and 279; 926 and 280; 926 and 281; 926 and 282; 926 and 283; 926 and 284; 926 and 285; 926 and 286; 926 and 287; 926 and 288; 926 and 289; 926 and 290; 926 and 291; 926 and 292; 927 and 270; 927 and 272; 927 and 273; 927 and 274; 927 and 275; 927 and 276; 927 and 277; 927 and 278; 927 and 279; 927 and 280; 927 and 281; 927 and 282; 927 and 283; 927 and 284; 927 and 285; 927 and 286; 927 and 287; 927 and 288; 927 and 289; 927 and 290; 927 and 291; 927 and 292; 928 and 270; 928 and 272; 928 and 273; 928 and 274; 928 and 275; 928 and 276; 928 and 277; 928 and 278; 928 and 279; 928 and 280; 928 and 281; 928 and 282; 928 and 283; 928 and 284; 928 and 285; 928 and 286; 928 and 287; 928 and 288; 928 and 289; 928 and 290; 928 and 291; 928 and 292; 929 and 270; 929 and 272; 929 and 273; 929 and 274; 929 and 275; 929 and 276; 929 and 277; 929 and 278; 929 and 279; 929 and 280; 929 and 281; 929 and 282; 929 and 283; 929 and 284; 929 and 285; 929 and 286; 929 and 287; 929 and 288; 929 and 289; 929 and 290; 929 and 291; 929 and 292; 930 and 270; 930 and 272; 930 and 273; 930 and 274; 930 and 275; 930 and 276; 930 and 277; 930 and 278; 930 and 279; 930 and 280; 930 and 281; 930 and 282; 930 and 283; 930 and 284; 930 and 285; 930 and 286; 930 and 287; 930 and 288; 930 and 289; 930 and 290; 930 and 291; 930 and 292; 931 and 270; 931 and 272; 931 and 273; 931 and 274; 931 and 275; 931 and 276; 931 and 277; 931 and 278; 931 and 279; 931 and 280; 931 and 281; 931 and 282; 931 and 283; 931 and 284; 931 and 285; 931 and 286; 931 and 287; 931 and 288; 931 and 289; 931 and 290; 931 and 291; 931 and 292; 932 and 270; 932 and 272; 932 and 273; 932 and 274; 932 and 275; 932 and 276; 932 and 277; 932 and 278; 932 and 279; 932 and 280; 932 and 281; 932 and 282; 932 and 283; 932 and 284; 932 and 285; 932 and 286; 932 and 287; 932 and 288; 932 and 289; 932 and 290; 932 and 291; 932 and 292; 933 and 270; 933 and 272; 933 and 273; 933 and 274; 933 and 275; 933 and 276; 933 and 277; 933 and 278; 933 and 279; 933 and 280; 933 and 281; 933 and 282; 933 and 283; 933 and 284; 933 and 285; 933 and 286; 933 and 287; 933 and 288; 933 and 289; 933 and 290; 933 and 291; 933 and 292; 934 and 270; 934 and 272; 934 and 273; 934 and 274; 934 and 275; 934 and 276; 934 and 277; 934 and 278; 934 and 279; 934 and 280; 934 and 281; 934 and 282; 934 and 283; 934 and 284; 934 and 285; 934 and 286; 934 and 287; 934 and 288; 934 and 289; 934 and 290; 934 and 291; 934 and 292; 935 and 270; 935 and 272; 935 and 273; 935 and 274; 935 and 275; 935 and 276; 935 and 277; 935 and 278; 935 and 279; 935 and 280; 935 and 281; 935 and 282; 935 and 283; 935 and 284; 935 and 285; 935 and 286; 935 and 287; 935 and 288; 935 and 289; 935 and 290; 935 and 291; 935 and 292; 936 and 270; 936 and 272; 936 and 273; 936 and 274; 936 and 275; 936 and 276; 936 and 277; 936 and 278; 936 and 279; 936 and 280; 936 and 281; 936 and 282; 936 and 283; 936 and 284; 936 and 285; 936 and 286; 936 and 287; 936 and 288; 936 and 289; 936 and 290; 936 and 291; 936 and 292; 937 and 270; 937 and 272; 937 and 273; 937 and 274; 937 and 275; 937 and 276; 937 and 277; 937 and 278; 937 and 279; 937 and 280; 937 and 281; 937 and 282; 937 and 283; 937 and 284; 937 and 285; 937 and 286; 937 and 287; 937 and 288; 937 and 289; 937 and 290; 937 and 291; 937 and 292; 938 and 270; 938 and 272; 938 and 273; 938 and 274; 938 and 275; 938 and 276; 938 and 277; 938 and 278; 938 and 279; 938 and 280; 938 and 281; 938 and 282; 938 and 283; 938 and 284; 938 and 285; 938 and 286; 938 and 287; 938 and 288; 938 and 289; 938 and 290; 938 and 291; 938 and 292; 950 and 275; 951 and 275; 952 and 275; 953 and 275; 954 and 275; or 955 and 275.

14. The composition of claim 13, wherein (a) the sRGN endonuclease comprises an amino acid sequence that is at least 80%, 85%, 90%, 91%, 92%, 93%, 94%, 95%, 96%, 97%, 98%, 99%, or 100% identical to the sequence of any one of SEQ ID Nos: 7024, 7026, or 7027; or (b) the sRGN endonuclease is encoded by a nucleic acid sequence that is at least 80%, 85%, 90%, 91%, 92%, 93%, 94%, 95%, 96%, 97%, 98%, 99%, or 100% identical to the sequence of any one of SEQ ID Nos: 917, 919 or 920.

15. (canceled)

16. The composition of claim 1, comprising at least two guide RNAs, wherein once expressed in vitro or in vivo in combination with an RNA-guided endonuclease, the at least two guide RNAs
(a) facilitate a 3n+1 edit of exon 45, 51 or 53 of the DMD gene, wherein “n” is any negative whole number (e.g., any whole number between −10 and −75); or
(b) facilitate a 3n+2 edit of exon 44 or 50 of the DMD gene, wherein “n” is any negative whole number (e.g., any whole number between −10 and −75).

17. The composition of claim 1, comprising at least two guide RNAs, wherein once expressed in vitro or in vivo in combination with an RNA-guided endonuclease, the at least two guide RNAs
(a) target exon 45, 51 or 53 of the DMD gene and are capable of excising a nucleic acid that is at least 26, 29, 32, 35, 38, 41, 44, 47, 50, 53, 56, 59, 62, 65, 68, 71, 74, 77, 80, 83, 86, 89, 92, 95, 98, 101, 104, 107, 110, 113, 116, 119, 122, 125, 128, 131, 134, 137, 140, 143, 146, 149, 152, 155, 158, 161, 164, 167, 170, 173, 176, 179, 182, 185, 188, 191, 194, 197, 200, 203, 206, 209, 212, 215, or 218 nucleotides in length; or
(b) target exon 44 or 50 of the DMD gene and are capable of excising a nucleic acid that is at least 25, 28, 31, 34, 37, 40, 43, 46, 49, 52, 55, 58, 61, 64, 67, 70, 73, 76, 79, 82, 85, 88, 91, 94, 97, 100, 103, 106, 109, 112, 115, 118, 121, 124, 127, 130, 133, 136, 139, 142, 145, 148, 151, 154, 157, 160, 163, 166, 169, 172, 175, 178, 181, 184, 187, 190, 193, 196, 199, 202, 205, 208, 211, 214, or 217 nucleotides in length.

18.-20. (canceled)

21. The composition of claim 1, comprising at least two guide RNAs, wherein once expressed in vitro or in vivo in combination with an RNA-guided endonuclease, the at least two guide RNAs excise a portion of a DMD exon, wherein
(a) the size of the excised portion of the DMD exon is between 5 and 250, 5 and 200, 5 and 150, 5 and 100, 5 and 75, 5 and 50, 5 and 25, 5 and 10, 20 and 250, 20 and 200, 20 and 150, 20 and 100, 20 and 75, 20 and 50, 20 and 25, 50 and 250, 50 and 200, 50 and 150, 50 and 100, or 50 and 75 nucleotides; or
(b) the size of the excised portion of the DMD exon is between 8 and 167 nucleotides.

22. (canceled)

23. The composition of claim 1, wherein the one or more guide RNAs is an sgRNA.

24. The composition of claim 1, wherein the one or more guide RNAs is modified.

25. The composition of claim 1, wherein the one or more guide RNAs or nucleic acids are in a vector.

26. The composition of claim 25, wherein the vector is a viral vector.

27. The composition of claim 26, wherein the viral vector is an AAV vector.

28. The composition of claim 27, wherein the AAV vector is an AAV9 vector.

29. The composition of claim 1, wherein the promoter for the one or more guide RNAs is hU6c.

30. The composition of claim 1, wherein
(a) the one or more guide RNAs is a guide RNA for SaCas9, and the one or more guide RNAs comprise a scaffold comprising the sequence of SEQ ID NO: 504; or
(b) the one or more guide RNAs is a guide RNA for SluCas9, and the one or more guide RNAs comprise a scaffold comprising the sequence of SEQ ID NO: 901.

31. (canceled)

32. The composition of claim 1, wherein the one or more guide RNAs is in an AAV vector, wherein the vector comprises from 5′ to 3′ with respect to the plus strand: the reverse complement of a first guide RNA scaffold sequence; the reverse complement of a nucleic acid encoding a first guide RNA sequence; the reverse complement of a promoter for expression of the nucleic acid encoding the first guide RNA sequence; a promoter for expression of a nucleic acid encoding a SaCas9, a SluCas9, or a sRGN (e.g., CK8e); a nucleic acid encoding the SaCas9, the SluCas9, or the sRGN (e.g., sRGN3.1, sRGN3,3, or sRGN4); a polyadenylation sequence; a promoter for expression of a second guide RNA sequence in the same direction as the promoter for the SaCas9, the SluCas9, or the sRGN; a nucleic acid encoding a second RNA guide sequence; and a second guide RNA scaffold sequence.

33. The composition of claim 32, wherein:
I.
i) the first guide RNA sequence comprises the sequence of SEQ TD NO: 271 or 281, and the second guide RNA sequence comprises the sequence of SEQ TD NO: 275; or
ii) the first guide RNA sequence comprises the sequence of SEQ ID NO: 283, and the second guide RNA sequence comprises the sequence of SEQ ID NO: 290; and/or
II. the promoter for expression of the nucleic acid encoding the SaCas9, the SluCas9, or the sRGN is a promoter for expression of the sRGN: wherein the nucleic acid encoding the SaCas9, the SluCas9, or the sRGN encodes the sRGN, and wherein the sRGN comprises an amino acid sequence that is at least 80%, 85%, 90%, 91%, 92%, 93%, 94%, 95%, 96%, 97%, 98%, 99%, or 100% identical to the sequence of any one of SEQ ID NOs: 7024, 7026, or 7027.

34. (canceled)

35. The composition of claim 33, wherein the nucleic acid encoding the sRGN comprises a nucleic acid sequence that is at least 80%, 85%, 90%, 91%, 92%, 93%, 94%, 95%, 96%, 97%, 98%, 99%, or 100% identical to the sequence of any one of SEQ ID Nos: 917, 919 or 920.

36. The composition of claim 1, wherein the one or more guide RNA sequences is no more than 16, no more than 17, no more than 18, no more than 19, no more than 20, no more than 21, or no more than 22 nucleotides in length.

37. A method of treating Duchenne Muscular Dystrophy (DMD), the method comprising delivering to a cell the composition of claim 1.

38. A method of excising a portion of the DMD gene, the method comprising delivering to a cell the composition of claim 1, wherein the composition comprises a pair of guide RNAs that are capable of excising a portion of the DMD gene, and wherein the size of the excised portion of the DMD gene is less than about 250 nucleotides.
